(19) United States
(12) Patent Application Publication
(10) Pub. No.: US 2011/0306044 A1
(43) Pub. Date: Dec. 15, 2011

(54) DELTA3, FTHMA-070, TANGO85, TANGO77, SPOIL, NEOKINE, TANGO129, AND INTEGRIN ALPHA SUBUNIT PROTEIN AND NUCLEIC ACID MOLECULES AND USES THEREOF

(75) Inventors: Sean A. McCarthy, San Diego, CA (US); David P. Gearing, Camberwell (AU)

(73) Assignee: MILLENNIUM PHARMACEUTICALS, INC., Cambridge, MA (US)

(21) Appl. No.: 12/984,939

(22) Filed: Jan. 5, 2011

Related U.S. Application Data
(63) Continuation of application No. 11/974,478, filed on Oct. 12, 2007, now Pat. No. 7,897,725.
Application No. 11/974,478 is a continuation of application No. 11/175,714, filed on Jul. 5, 2005, now abandoned.
Application No. 11/175,714 is a continuation-in-part of application No. 10/417,719, filed on Apr. 17, 2003, now abandoned.
Application No. 10/417,719 is a continuation of application No. 09/568,218, filed on May 9, 2000, now abandoned.
Application No. 09/568,218 is a continuation-in-part of application No. 08/872,855, filed on Jun. 11, 1997, now Pat. No. 6,121,045.
Application No. 08/872,855 is a continuation-in-part of application No. 08/832,633, filed on Apr. 4, 1997, now abandoned.
Application No. 11/175,714 is a continuation-in-part of application No. 10/895,676, filed on Jul. 21, 2004, now abandoned.
Application No. 10/895,676 is a continuation of application No. 10/105,934, filed on Mar. 25, 2002, now abandoned.
Application No. 10/105,934 is a continuation of application No. 09/862,972, filed on May 22, 2001, now abandoned.
Application No. 09/862,972 is a continuation of application No. 09/062,389, filed on Apr. 17, 1998, now abandoned.
Application No. 11/175,714 is a continuation-in-part of application No. 10/095,407, filed on Mar. 11, 2002, now abandoned.
Application No. 10/095,407 is a continuation of application No. 09/451,828, filed on Nov. 30, 1999, now abandoned.
Application No. 09/451,828 is a division of application No. 09/128,155, filed on Aug. 3, 1998, now Pat. No. 6,117,654.
Application No. 11/175,714 is a continuation-in-part of application No. 10/126,560, filed on Apr. 19, 2002, now abandoned.
Application No. 10/126,560 is a continuation-in-part of application No. 09/237,571, filed on Jan. 26, 1999, now abandoned.
Application No. 09/237,571 is a continuation-in-part of application No. 09/013,810, filed on Jan. 27, 1998, now Pat. No. 6,197,551.
Application No. 11/175,714 is a continuation-in-part of application No. 10/413,899, filed on Apr. 14, 2003, now abandoned.
Application No. 10/413,899 is a division of application No. 09/940,240, filed on Aug. 27, 2001, now abandoned.
Application No. 09/940,240 is a continuation of application No. 09/248,239, filed on Feb. 10, 1999, now abandoned.
Application No. 09/248,239 is a continuation-in-part of application No. 09/023,664, filed on Feb. 10, 1998, now abandoned.
Application No. 11/175,714 is a continuation-in-part of application No. 10/105,150, filed on Mar. 25, 2002, now abandoned.
Application No. 10/105,150 is a continuation of application No. 10/060,680, filed on Jan. 30, 2002, now abandoned.
Application No. 10/060,680 is a continuation of application No. 09/057,951, filed on Apr. 9, 1998, now abandoned.
Application No. 11/175,714 is a continuation-in-part of application No. 10/601,368, filed on Jun. 23, 2003, now abandoned.
Application No. 10/601,368 is a continuation of application No. 09/572,003, filed on May 15, 2000, now abandoned.
Application No. 09/572,003 is a continuation-in-part of application No. 09/561,263, filed on Apr. 27, 2000, now abandoned.
Application No. 09/561,263 is a continuation-in-part of application No. 09/322,790, filed on May 28, 1999, now abandoned.
(60) Provisional application No. 60/062,017, filed on Oct. 10, 1997.
(60) Provisional application No. 60/044,746, filed on Apr. 18, 1997.
(60) Provisional application No. 60/091,650, filed on Jul. 2, 1998.
(60) Provisional application No. 60/054,646, filed on Aug. 4, 1997.

(51) Int. Cl. G01N 33/566; C12N 15/85; C12N 5/10; C12P 21/02; C12N 5/071; C12N 9/96; C07K 14/47; C07K 19/00; C07K 16/18; G01N 33/53; C07K 1/107; C12N 15/12; C12Q 1/68

(52) U.S. Cl. 435/6.11; 536/23.5; 435/320.1; 435/325; 435/69.1; 436/501; 435/375; 530/350; 530/324; 530/387.9; 530/387.3; 435/7.92; 530/409; 530/391.3; 435/188

(57) ABSTRACT

The invention provides novel Delta3, FTHMA-070, Tango85, Tango77, SPOIL, NEOKINE, Tango129 and A259 polypeptides, proteins, and nucleic acid molecules. In addition to isolated, full-length Delta3, FTHMA-070, Tango85, Tango77, SPOIL, NEOKINE, Tango129 and A259 proteins, the invention further provides isolated Delta3, FTHMA-070, Tango85, Tango77, SPOIL, NEOKINE, Tango129 and A259 fusion proteins, antigenic peptides and anti-Delta3, FTHMA-070, Tango85, Tango77, SPOIL, NEOKINE, Tango129 and A259 antibodies. The invention also provides Delta3, FTHMA-070, Tango85, Tango77, SPOIL, NEOKINE, Tango129 and A259 nucleic acid molecules, recombinant expression vectors containing a nucleic acid molecule of the invention, host cells into which the expression vectors have been introduced and non-human transgenic animals in which a Delta3, FTHMA-070, Tango85, Tango77, SPOIL, NEOKINE, Tango129 or A259 gene has been introduced or disrupted. Diagnostic, screening and therapeutic methods utilizing compositions of the invention are also provided.

### CROSS REFERENCE TO RELATED APPLICATIONS

[0001] This application is a continuation of U.S. patent application Ser. No. 11/175,714, filed Jul. 5, 2005, pending.

[0002] U.S. patent application Ser. No. 11/175,714, filed Jul. 5, 2005, is a continuation-in-part of U.S. patent application Ser. No. 10/417,719, filed Apr. 17, 2003, now abandoned, which is a continuation of U.S. patent application Ser. No. 09/568,218, filed May 9, 2000, now abandoned, which is a continuation-in-part of U.S. patent application Ser. No. 08/872,855, filed Jun. 11, 1997, now U.S. Pat. No. 6,121,045, which is a continuation-in-part of U.S. patent application Ser. No. 08/832,633, filed Apr. 4, 1997, now abandoned.

[0003] U.S. patent application Ser. No. 11/175,714, filed Jul. 5, 2005, is also a continuation-in-part of U.S. patent application Ser. No. 10/895,676, filed Jul. 21, 2004, now abandoned, which is a continuation of U.S. patent application Ser. No. 10/105,934, filed Mar. 25, 2002, now abandoned, which is a continuation of U.S. patent application Ser. No. 09/862,972, filed May 22, 2001, now abandoned, which is a continuation of U.S. patent application Ser. No. 09/062,389, filed Apr. 17, 1998, now abandoned, which claims the benefit of Provisional Application Ser. No. 60/062,017, filed Oct. 10, 1997, now abandoned, and Provisional Application Ser. No. 60/044,746, filed Apr. 18, 1997, now abandoned.

[0004] U.S. patent application Ser. No. 11/175,714, filed Jul. 5, 2005, is also a continuation-in-part of U.S. patent application Ser. No. 10/095,407, filed Mar. 11, 2002, now abandoned, which is a continuation of U.S. patent application Ser. No. 09/451,828, filed Nov. 30, 1999, now abandoned, which is a divisional of U.S. patent application Ser. No. 09/128,155, filed Aug. 3, 1998, now U.S. Pat. No. 6,117,654, which claims the benefit of Provisional Application Ser. No. 60/091,650, filed Jul. 2, 1998, now abandoned, and Provisional Application Ser. No. 60/054,646, filed Aug. 4, 1997, now abandoned.

[0005] U.S. patent application Ser. No. 11/175,714, filed Jul. 5, 2005, is also a continuation-in-part of U.S. patent application Ser. No. 10/126,560, filed Apr. 19, 2002, now abandoned, which is a continuation-in-part of U.S. patent application Ser. No. 09/237,571, filed Jan. 26, 1999, now abandoned, which is a continuation-in-part of U.S. patent application Ser. No. 09/013,810, filed Jan. 27, 1998, now U.S. Pat. No. 6,197,551.

[0006] U.S. patent application Ser. No. 11/175,714, filed Jul. 5, 2005, is also a continuation-in-part of U.S. patent application Ser. No. 10/413,899, filed Apr. 14, 2003, now abandoned, which is a divisional of U.S. patent application Ser. No. 09/940,240, filed Aug. 27, 2001, now abandoned, which is a continuation of U.S. patent application Ser. No. 09/248,239, filed Feb. 10, 1999, now abandoned, which is a continuation-in-part of U.S. patent application Ser. No. 09/023,664, filed Feb. 10, 1998, now abandoned.

[0007] U.S. patent application Ser. No. 11/175,714, filed Jul. 5, 2005, is also a continuation-in-part of U.S. patent application Ser. No. 10/105,150, filed Mar. 25, 2002, now abandoned, which is a continuation of U.S. patent application Ser. No. 10/060,680, filed Jan. 30, 2002, now abandoned, which is a continuation of U.S. patent application Ser. No. 09/057,951, filed Jan. 8, 2001, now abandoned.

[0008] U.S. patent application Ser. No. 11/175,714, filed Jul. 5, 2005, is also a continuation-in-part of U.S. patent application Ser. No. 10/601,368, filed Jun. 23, 2003, now abandoned, which is a continuation of U.S. patent application Ser. No. 09/572,003, filed May 15, 2000, now abandoned, which is a continuation-in-part of U.S. patent application Ser. No. 09/561,263, filed Apr. 27, 2000, now abandoned, which is a continuation-in-part of U.S. patent application Ser. No. 09/322,790, filed May 28, 1999, now abandoned.

[0009] The entire contents of each of the above-listed patent applications are incorporated herein by reference.

[0010] The contents of the Sequence Listing are submitted herewith on compact disc in duplicate. Each duplicate disc has a copy of the file “sequence listing.txt” which is incorporated herein by this reference. This file is 961 kilobytes and was copied onto compact disc on Oct. 12, 2007.

### BACKGROUND OF THE INVENTION

[0011] There is considerable medical interest in secreted and membrane-associated mammalian proteins. Many such proteins, for example, cytokines, are important for inducing the growth or differentiation of cells with which they interact or for triggering one or more specific cellular responses.

[0012] The demonstrated clinical utility of several secreted proteins in the treatment of human disease, for example, erythropoietin, granulocyte-macrophage colony stimulating factor (GM-CSF), human growth hormone, and various interleukins, illustrates the importance of secreted proteins.

[0013] Many membrane-associated proteins are receptors which bind a ligand(s) and transmit an intracellular signal. As such, membrane-associated proteins can be used to identify (or design) small molecules which act as agonists or antagonists of the ligand.

### SUMMARY OF THE INVENTION

[0014] The present invention is based, at least in part, on the discovery of cDNA molecules which encode the TANGO 24 (DELTA3), FTHMA-070, TANGO 85, TANGO 77, TANGO 80 (SPOIL), TANGO 112 (NEOKINE), TANGO 129 and A259 (INTEGRIN ALPHA SUBUNIT) proteins.

### Delta 3

[0015] The invention is based at least in part on the discovery of a human gene encoding a novel Delta protein, and its mouse homolog, each of which differs substantially from the previously described Delta proteins. Accordingly, the novel Delta proteins of the invention are referred to herein as Delta3 proteins. Thus, the invention provides Delta3 proteins, and nucleic acids encoding Delta3 proteins. An exemplary human Delta3 (hDelta3) is contained in a plasmid which was deposited with the ATCC® on Mar. 5, 1997, and has been assigned ATCC® accession number 98348.

[0016] Based on Northern blot analysis of RNA prepared from a number of human tissues, a 3.5 kb message was expressed in fetal brain, lung, liver and kidney; and adult heart, placenta, lung, skeletal muscle, kidney, pancreas, spleen, thymus, prostate, testis, ovary, small intestine and colon. In addition, the hDelta3 gene was found to be expressed at relatively high levels in at least some tumor cells (e.g., colon carcinoma) and its expression can be up-regulated in response to various growth factors (e.g., bFGF and VEGF). Furthermore, the expression of hDelta3 was also shown to increase in response to a signal-induced differentiation of endothelial cells, indicating a role for hDelta3 in modulating the growth and/or differentiation of cells, in particular endothelial cells.

[0017] In situ hybridization of a panel of adult and embryonic tissues using a probe complementary to mRNA of mDelta3 showed that mDelta3 expression was most abundant and widespread during embryogenesis. Strongest expression was observed in the eye during all stages of embryogenesis tested, mDelta3 was also seen in the developing lung, thymus and brown fat. In addition to the focal expression seen above, a multi-focal, scattered pattern was seen throughout the embryo. This signal pattern was more focused in the cortical region of the kidney and outlining the intestinal tract. Adult expression was highest in the ovary and the cortical regions of the kidney and adrenal gland. The expression seen during embryogenesis indicates that Delta3 has a role in cell growth and/or differentiation.

[0018] As demonstrated herein, Delta3 encodes a Notch ligand. In particular, data presented herein demonstrates that hDelta3 encodes a Notch ligand, as it has been shown to block the differentiation of C2C12 into myotubes in a similar fashion to other Notch ligands (e.g., Jagged 1).

[0019] As described herein, the hDelta3 gene has been localized by Southern blotting a membrane containing DNA from a panel of a human/hamster mono-chromosomal somatic cell hybrids. The results demonstrate that human Delta3 is located on human chromosome 15, close to framework markers D15S1244 and D15S144, a chromosomal region that has been associated with the neurological disease Agenesis of the Corpus Callosum with Peripheral Neuropathy (ACCPN) (Casaubon et al. (1996) Am J. Hum. Genet. 58:28). Accordingly, polymorphisms in Delta3 are thought to be involved in this neurological disease. As described further herein, Delta3 is also likely to be involved in other neurological diseases as well as in non-neurological diseases.

[0020] In one aspect, the invention features isolated Delta3 nucleic acid molecules, e.g., mammalian, such as human or mouse, Delta3 nucleic acids. The disclosed molecules can be non-coding, (e.g., probe, antisense or ribozyme molecules) or can encode a functional Delta3 polypeptide, e.g., a polypeptide which can modulate at least one activity of a Delta3 polypeptide. In one embodiment, the nucleic acid molecules hybridize to the Delta3 gene contained in the plasmid having American Type Culture Collection (ATCC®) Accession Number 98348. In another embodiment, the claimed nucleic acid is capable of hybridizing under stringent conditions to the nucleotide sequence set forth in SEQ ID NOS: 1, 3, 24, 26, 27, 29, 31, 33, 35, 37, 39, 41, 43 or 45, or the nucleotide sequence of the cDNA of a clone deposited with the ATCC® as Accession Number 98348, or to the complement thereof.

[0021] In further embodiments, the nucleic acid molecule is a Delta3 nucleic acid molecule that is at least about 50%, 55%, 60%, 70%, preferably 80%, more preferably 85%, and even more preferably at least about 95% or 98% identical to the nucleic acids shown in SEQ ID Nos: 1, 3, 24, 26, 27, 29, 31, 33, 35, 37, 39, 41, 43 or 45, or the nucleotide sequence of the cDNA of a clone deposited with the ATCC® as Accession Number 98348, or a complement thereof.

[0022] In another embodiment, the nucleic acid molecule is a Delta3 nucleic acid that is at least about 50%, 55%, 60%, 65%, 70%, preferably 80%, more preferably 85%, and even more preferably at least about 95% or 98% identical to the nucleic acids shown in SEQ ID NOS: 1, 3, 24, 26, 27, 29, 31, 33, 35, 37, 39, 41, 43 or 45, or the nucleotide sequence of the cDNA of a clone deposited with the ATCC® as Accession Number 98348 or a complement thereof, wherein such nucleic acid molecules encode polypeptides or proteins that exhibit at least one structural and/or functional feature of a polypeptide of the invention.

[0023] In another embodiment, the nucleic acid molecule encodes a polypeptide that is at least about 55%, 60%, 70%, preferably 80%, more preferably 85%, and even more preferably at least about 90, 95% or 98% identical to the polypeptide shown in SEQ ID NOS: 2, 25, 28, 30, 32, 34, 36, 38, 40, 42, 44 or 46, or the amino acid sequence encoded by the cDNA of a clone deposited with the ATCC® as Accession Number 98348, or a complement thereof.

[0024] In another embodiment, the nucleic acid molecule encodes a polypeptide that is at least about 55%, 60%, 70%, preferably 80%, more preferably 85%, and even more preferably at least about 90, 95% or 98% identical to the polypeptide shown in SEQ ID NOS: 2, 25, 28, 30, 32, 34, 36, 38, 40, 42, 44 or 46, or the amino acid sequence encoded by the cDNA of a clone deposited with the ATCC® as Accession Number 98348, or a complement thereof, wherein such nucleic acid molecules encode polypeptides or proteins that exhibit at least one structural and/or functional feature of a polypeptide of the invention. In another embodiment, the nucleic acid molecule encodes a polypeptide that is at least about 72%, preferably 80%, more preferably 85%, and even more preferably at least about 90 or 95% similar to the polypeptide shown in SEQ ID NOS: 2, 25, 28, 30, 32, 34, 36, 38, 40, 42, 44 or 46, or the hDelta 3 cDNA sequence contained in the plasmid having ATCC® Accession Number 98348, or a complement thereof.

[0025] In another embodiment, the nucleic acid molecule encodes a polypeptide that is at least about 72%, preferably 80%, more preferably 85%, and even more preferably at least about 90 or 95% similar to the polypeptide shown in SEQ ID NOS: 2, 25, 28, 30, 32, 34, 36, 38, 40, 42, 44 or 46, or the Delta 3 cDNA sequence contained in the plasmid having ATCC® Accession Number 98348, or a complement thereof, wherein such nucleic acid molecules encode polypeptides or proteins that exhibit at least one structural and/or functional feature of a polypeptide of the invention.

[0026] Also within the invention are nucleic acid molecules which encode a fragment of a polypeptide having the amino acid sequence of any of SEQ ID NOS: 2, 25, 28, 30, 32, 34, 36, 38, 40, 42, 44 or 46, the fragment including at least 15 (20, 25, 30, 35, 40, 45, 50, 55, 60, 65, 70, 75, 80, 85, 90, 95, 100, 110, 120, 130, 140, 150, 160, 170, 180, 190, 200, 210, 220, 230, 240, 250, 260, 270, 280, 290, 300, 310, 320, 330, 340, 350, 360, 370, 380, 390, 400, 410, 420, 440, 460, 475, 500, 525, 550, 575, 600, 625, 650, 675, or 685) contiguous amino acids of any of SEQ ID NOS: 2, 25, 28, 30, 32, 34, 36, 38, 40, 42, 44 or 46, or the polypeptide encoded by the cDNA of a clone deposited with the ATCC® as Accession Number 98348.

[0027] Also within the invention are nucleic acid molecules which encode a fragment of a polypeptide having the amino acid sequence of any of SEQ ID NOS: 2, 25, 28, 30, 32, 34, 36, 38, 40, 42, 44 or 46, the fragment including at least 15 (20, 25, 30, 35, 40, 45, 50, 55, 60, 65, 70, 75, 80, 85, 90, 95, 100, 110, 120, 130, 140, 150, 160, 170, 180, 190, 200, 210, 220, 230, 240, 250, 260, 270, 280, 290, 300, 310, 320, 330, 340, 350, 360, 370, 380, 390, 400, 410, 420, 440, 460, 475, 500, 525, 550, 575, 600, 625, 650, 675, or 685) contiguous amino acids of any of SEQ ID NOS: 2, 25, 28, 30, 32, 34, 36, 38, 40, 42, 44 or 46, or the polypeptide encoded by the cDNA of a clone deposited with the ATCC® as Accession Number 98348, wherein the fragment exhibits at least one structural and/or functional feature of a polypeptide of the invention.

[0028] The nucleic acids of the invention can comprise a nucleotide sequence encoding at least one domain or motif of a Delta3 protein, i.e., a domain or motif selected from the group consisting of an amino-terminal signal peptide, a Delta-Serrated lag-2 (DSL) domain, Epidermal Growth Factor (EGF)-like domain 1, EGF-like domain 2, EGF-like domain 3, EGF-like domain 4, EGF-like domain 5, EGF-like domain 6, EGF-like domain 7, EGF-like domain 8, a Delta3 extracellular domain, a transmembrane domain (TM), and a cytoplasmic domain. Other nucleic acids of the invention encode soluble Delta3 proteins, e.g., Delta3 proteins comprising at least a portion, such as one or more domains, of the extracellular domain of a Delta3 protein. A soluble Delta3 protein is a protein that is soluble at standard physiological conditions, and includes, but is not limited to a Delta3 protein that does not comprise a transmembrane domain, e.g., an extracellular Delta3 domain. These soluble polypeptides may or may not comprise a signal peptide. Other such nucleic acids encode soluble fusion proteins comprising Delta3 amino acid sequence and a heterologous amino acid sequence, e.g., an immunoglobulin constant region.

[0029] The invention also provides probes and primers comprising substantially purified oligonucleotides, which correspond to a region of nucleotide sequence which hybridizes to at least about 6 consecutive nucleotides of the sequences set forth as SEQ ID NOs: 1, 3, 24, 26, 27, 29, 31, 33, 35, 37, 39, 41, 43 or 45, or the nucleotide sequence of the cDNA of a clone deposited with the ATCC® as Accession Number 98348, or a complement thereof, or naturally-occurring mutants thereof. In preferred embodiments, the probe/primer further includes a label group attached thereto, which is capable of being detected.

[0030] The invention features nucleic acid molecules of at least 425, 450, 500, 550, 600, 650, 700, 750, 800, 850, 900, 950, 1000, 1100, 1200, 1300, 1400, 1500, 1600, 1700, 1800, 1900, 2000, 2100, 2200, 2300, 2400, 2500, 2600, 2700, or 2800 nucleotides of the nucleotide sequence of SEQ ID NO: 1, the nucleotide sequence of the human Delta3 cDNA clone of ATCC® Accession NO: 98348, or a complement thereof. The invention also features nucleic acid molecules comprising at least 25, 50, 100, 150, 200, 250, 300, 350, 400, 450, 500, 600, 650, 700, 750, 800, 850, 900, 950, 1000, 1050, 1100, 1150, 1200, 1250, 1300, 1350, 1400, 1450, 1500, 1550, 1600, 1650, 1700, 1750, 1800, 1850, 1900, 1950, 2000, 2050 or 2061 nucleotides of nucleic acids 1 to 2062 of SEQ ID NO:1, or a complement thereof, wherein such nucleic acid molecules encode polypeptides or proteins that exhibit at least one structural and/or functional feature of a polypeptide of the invention.

[0031] The invention features nucleic acid molecules which include a fragment of at least 340, 400, 450, 500, 550, 600, 650, 700, 750, 800, 850, 900, 950, 1000, 1050, 1100, 1150, 1200, 1250, 1300, 1350, 1400, 1450, 1450, 1500, 1550, 1600, 1650, 1700, 1750, 1800, 1850, 1900, 1950, 2000, 2050 or 2058 nucleotides of the nucleotide sequence of SEQ ID NO:3, or a complement thereof. The invention also features nucleic acid molecules comprising at least 25, 50, 100, 150, 200, 250, 300, 350, 400, 450, 500, 600, 650, 700, 750, 800, 850, 900, 950, 1000, 1050, 1100, 1150, 1200, 1250, 1300, 1350, 1400, 1450, 1500, 1550, 1600, 1650, 1700, or 1724 nucleotides of nucleic acids 1 to 1725 of SEQ ID NO:3, or a complement thereof.

[0032] The invention features nucleic acid molecules of at least 480, 500, 550, 600, 650, 700, 750, 800, 850, 900, 950, 1000, 1050, 1100, 1150, 1200, 1250, 1300, 1350, 1400, 1450, 1450, 1500, 1550, 1600, 1650, 1700, 1750, 1800, 1850, 1900, 1950, 2000, 2050, 2100, 2200, 2300, 2400, 2500, 2600, 2700, 2800, 2900, 3000, 3100 or 3130 nucleotides of the nucleotide sequence of SEQ ID NO:24, the nucleotide sequence of the mouse Delta3 cDNA, or a complement thereof. The invention also features nucleic acid molecules comprising at least 25, 50, 100, 150, 200, 250, 300, 350, 400, 450, 500, 600, 650, 700, 750, 800, 850, 900, 950, 1000, 1050, 1100, 1150, 1200, 1250, 1300, 1350, 1400, 1450, 1500, or 1529 nucleotides of nucleic acids 1 to 1530 of SEQ ID NO:24, or a complement thereof, wherein such nucleic acid molecules encode polypeptides or proteins that exhibit at least one structural and/or functional feature of a polypeptide of the invention.

[0033] The invention features nucleic acid molecules which include a fragment of at least 415, 450, 500, 550, 600, 650, 700, 750, 800, 850, 900, 950, 1000, 1050, 1100, 1150, 1200, 1250, 1300, 1350, 1400, 1450, 1450, 1500, 1550, 1600, 1650, 1700, 1750, 1800, 1850, 1900, 1950, 2000, 2050, 2100 nucleotides of the nucleotide sequence of SEQ ID NO: 26, or a complement thereof. The invention also features nucleic acid molecules comprising at least 25, 50, 100, 150, 200, 250, 300, 350, 400, 450, 500, 600, 650, 700, 750, 800, 850, 900, 950, 1000, 1050, 1100, 1150, 1200, 1250, 1300, 1350, 1400, 1450, 1500 or 1529 nucleotides of nucleic acids 1 to 1530 of SEQ ID NO: 3, or a complement thereof.

[0034] Another aspect of the invention provides vectors, e.g., recombinant expression vectors, comprising a nucleic acid molecule of the invention. In another embodiment the invention provides host cells containing such a vector. The invention also provides methods for producing a polypeptide of the invention by culturing, in a suitable medium, a host cell of the invention containing a recombinant expression vector encoding a polypeptide of the invention such that the polypeptide of the invention is produced.

[0035] For expression, the subject Delta3 nucleic acids can include a mammalian transcriptional regulatory sequence, e.g., at least one of a transcriptional promoter (e.g., for constitutive expression or inducible expression) or transcriptional enhancer sequence, the regulatory sequence is operably linked to the Delta3 gene sequence. Such regulatory sequences in conjunction with Delta3 nucleic acid molecules can be useful in vectors for gene expression. This invention also describes host cells transfected with said expression vectors whether prokaryotic or eukaryotic, also in vitro (e.g., cell culture) and in vivo (e.g., transgenic) methods for producing Delta3 proteins by employing said expression vectors. In a preferred embodiment, the Delta3 nucleic acids are cloned into a mammalian expression vector, and transfected into mammalian cells. The use of mammalian cells increases the likelihood of proper protein folding and post-translational modification of the expressed proteins.

[0036] The invention also features nucleic acid molecules that hybridize under stringent conditions to a nucleic acid molecule comprising the nucleotide sequence of any of SEQ ID NOS: 1, 3, 24, 26, 27, 29, 31, 33, 35, 37, 39, 41, 43 or 45 of the cDNA of a clone deposited with the ATCC® as Accession Number 98348, or a complement thereof, wherein preferably such nucleic acid molecules encode polypeptides or proteins that exhibit at least one structural and/or functional feature of a polypeptide of the invention. In other embodiments, the nucleic acid molecules are at least 485 (500, 550, 600, 650, 700, 800, 900, 1000, 1100, 1200, 1300, 1400, 1500, 1600, 1700, 1800, 1900, 2000, 2100, 2200, 2300, 2400, 2500, 2600, 2700, or 2800) nucleotides in length and hybridize under stringent conditions to a nucleic acid molecule comprising the nucleotide sequence of any of SEQ ID NOS: 1, 3, 24, 26, 27, 29, 31, 33, 35, 37, 39, 41, 43 or 45 of the cDNA of a clone deposited with the ATCC® as Accession Number 98348, or a complement thereof.

[0037] In preferred embodiments, the isolated nucleic acid molecules encode a cytoplasmic, transmembrane, or extracellular domain of a polypeptide of the invention.

[0038] The invention includes nucleic acid molecules which encode an allelic variant of a polypeptide comprising the amino acid sequence of any of SEQ ID NOS: 2, 25, 28, 30, 32, 34, 36, 38, 40, 42, 44 or 46, or an amino acid sequence encoded by the cDNA of a clone deposited with the ATCC® as Accession Number 98348, or a complement thereof, wherein the nucleic acid molecule hybridizes under stringent conditions to a nucleic acid molecule having a nucleic acid sequence encoding any of SEQ ID NOS:1, 3, 24, 26, 27, 29, 31, 33, 35, 37, 39, 41, 43 or 45, or the nucleotide sequence of the cDNA of a clone deposited with the ATCC® as Accession Number 98348, or a complement thereof.

[0039] The invention includes nucleic acid molecules which encode an allelic variant of a polypeptide comprising the amino acid sequence of any of SEQ ID NOS: 2, 25, 28, 30, 32, 34, 36, 38, 40, 42, 44 or 46, or an amino acid sequence encoded by the cDNA of a clone deposited with the ATCC® as Accession Number 98348, or a complement thereof, wherein the nucleic acid molecule hybridizes under stringent conditions to a nucleic acid molecule having a nucleic acid sequence encoding a polypeptide having any of the amino acid sequences shown in SEQ ID NOS: 2, 25, 28, 30, 32, 34, 36, 38, 40, 42, 44 or 46, or the amino acid sequence encoded by the cDNA of a clone deposited with the ATCC® as Accession Number 98348, or a complement thereof, wherein such nucleic acid molecules encode polypeptides or proteins that exhibit at least one structural and/or functional feature of a polypeptide of the invention.

[0040] In one embodiment of a nucleotide sequence of human Delta3, the nucleotide at position 455 is a guanine (G) (SEQ ID NO: 1). In this embodiment, the amino acid at position 40 is glutamate (E) (SEQ ID NO: 2). In another embodiment of a nucleotide sequence of human Delta3, the nucleotide at position 455 is a cytosine (C) (SEQ ID NO: 27). In this embodiment, the amino acid at position 40 is glutamine (Q) (SEQ ID NO: 28). In another embodiment of a nucleotide sequence of human Delta3, the nucleotide at position 455 is a thymidine (T) (SEQ ID NO: 29). In this embodiment, the amino acid at position 40 is a stop codon (SEQ ID NO: 30). In another embodiment of a nucleotide sequence of human Delta3, the nucleotide at position 455 is a adenine (A) (SEQ ID NO: 31). In this embodiment, the amino acid at position 40 is lysine (K) (SEQ ID NO: 32).

[0041] In another embodiment, the invention provides an isolated nucleic acid molecule which is antisense to the coding strand of a nucleic acid of the invention.

[0042] In another aspect, the invention features isolated Delta3 polypeptides, preferably substantially pure preparations, e.g., of plasma-purified or recombinantly produced Delta3 polypeptides. Preferred proteins and polypeptides possess at least one biological activity of the corresponding naturally-occurring human polypeptide. Such an activity can be a direct activity, such as an association with or an enzymatic activity on a second protein or an indirect activity, such as a cellular signaling activity mediated by interaction of the protein with a second protein. Thus, such activities include, for example, ones related to Delta3's function as a Notch ligand. Delta3 activities include, e.g., (1) the ability to form protein-protein interactions with proteins in the signaling pathway of the naturally-occurring polypeptide; (2) the ability to bind a ligand of the naturally-occurring polypeptide; (3) the ability to bind to an intracellular target of the naturally-occurring polypeptide; (4) the ability to modulate cellular proliferation; (5) the ability to modulate cellular differentiation; (6) the ability to modulate chemotaxis and/or migration; and/or (7) the ability to modulate cell death; (8) maintenance of energy homeostasis (e.g., regulating the balance or imbalance between energy storage and energy expenditure, for example, increasing or decreasing energy expenditure; (9) regulation of adaptive thermogenesis (e.g., regulation of the biogenesis of mitochondria, regulation of the expression of mitochondrial enzymes, regulation of expression of uncoupling proteins; (10) regulation of adiposity; (11) modulation of the efficiency of energy storage; (12) regulation of appetite; (13) expansion/reduction of fat mass; (14) regulation of vasculogenesis (blood vessel formation); (15) regulation of tumor angiogenesis; (16) regulation of wound healing; (17) expansion/reduction of tumor mass; (18) the ability to modulate development, differentiation, proliferation and/or activity of immune cells (e.g., leukocytes and macrophages), endothelial cells and smooth muscle cells; (19) the ability to modulate the host immune response; (20) the ability to modulate the development of organs, tissues and/or cells of the embryo and/or fetus; (21) the ability to modulate cell-cell interactions and/or cell-extracellular matrix interactions; (22) the ability to modulate atherosclerosis, e.g., the initiation and progression of atherosclerosis; (23) the ability to modulate atherogenesis; (24) the ability to modulate inflammatory functions e.g., by modulating leukocyte adhesion to extracellular matrix and/or endothelial cells; (25) the ability to form, e.g., stabilize, promote, facilitate, inhibit, or disrupt, cell to cell and cell to blood product interaction, e.g., between leukocytes and platelets or leukocytes and vascular endothelial cells; (26) ability to modulate development, differentiation and activity of skeletal muscle cells and tissue; and (27) ability to act in stem cell preservation.

[0043] In certain embodiments, the subject polypeptides are capable of modulating an activity of a Delta3 polypeptide, e.g., cell growth and/or differentiation or induction of apoptosis. In other embodiments, the subject Delta3 polypeptides can modulate neurogenesis (e.g., by inhibiting Notch expressing cells from becoming committed to a neural fate). In addition, Delta3 polypeptides which specifically antagonize the activity of a native Delta3 polypeptide, such as may be provided by truncation mutants or other dominant negative mutants, are also specifically provided herein.

[0044] In one embodiment, a polypeptide of the invention has an amino acid sequence sufficiently identical to an identified domain of a polypeptide of the invention. As used herein, the term “sufficiently identical” refers to a first amino acid or nucleotide sequence which contains a sufficient or minimum number of identical or equivalent (e.g., with a similar side chain) amino acid residues or nucleotides to a second amino acid or nucleotide sequence such that the first and second amino acid or nucleotide sequences have a common structural domain and/or common functional activity. For example, amino acid or nucleotide sequences which contain a common structural domain having about 65% identity, preferably 75% identity, more preferably 85%, 95%, or 98% identity.

[0045] In one embodiment, the polypeptide is identical to a Delta3 protein represented in SEQ ID NOs: 2, 25, 28, 30, 32, 34, 36, 38, 40, 42, 44 or 46, or the amino acid sequence encoded by the cDNA of a clone deposited with the ATCC® as Accession Number 98348. Preferably, a Delta3 polypeptide has an amino acid sequence, which is at least about 55%, 60%, 70%, preferably at least about 80%, more preferably at least about 90%, and even more preferably at least about 95% or 98% identical to the polypeptide represented by SEQ ID NOs: 2, 25, 28, 30, 32, 34, 36, 38, 40, 42, 44 or 46, or the amino acid sequence encoded by the cDNA of a clone deposited with the ATCC® as Accession Number 98348.

[0046] Also within the invention are isolated polypeptides or proteins having an amino acid sequence that is at least about 55%, preferably 65%, 75%, 85%, 95%, or 98% identical to the amino acid sequence of any of SEQ ID NOs: 2, 25, 28, 30, 32, 34, 36, 38, 40, 42, 44 or 46, or the amino acid sequence encoded by the cDNA of a clone deposited with the ATCC® as Accession Number 98348, wherein the polypeptides or proteins also exhibit at least one structural and/or functional feature of a polypeptide of the invention.

[0047] Also within the invention are isolated polypeptides or proteins which preferably are encoded by a nucleic acid molecule having a nucleotide sequence that is at least about 55%, more preferably 60%, 65%, 75%, 85%, or 95% identical the nucleic acid sequence encoding any of SEQ ID NOs: 2, 25, 28, 30, 32, 34, 36, 38, 40, 42, 44 or 46, wherein the polypeptides or proteins preferably also exhibit at least one structural and/or functional feature of a polypeptide of the invention, and isolated polypeptides or proteins which are encoded by a nucleic acid molecule having a nucleotide sequence which hybridizes under stringent hybridization conditions to a nucleic acid molecule having the sequence of any of SEQ ID NOs:1, 3, 24, 26, 27, 29, 31, 33, 35, 37, 39, 41, 43 or 45, or a complement thereof, or the non-coding strand of the cDNA of a clone deposited with the ATCC® as Accession Number 98348.

[0048] In a preferred embodiment, the Delta3 polypeptide is encoded by a nucleic acid which hybridizes in high stringency conditions with a nucleic acid sequence represented in one of SEQ ID NOs: 1, 3, 24, 26, 27, 29, 31, 33, 35, 37, 39, 41, 43 or 45 or with the nucleic acid contained in the plasmid having ATCC® Accession NO: 98348.

[0049] The subject Delta3 proteins also include modified proteins, which are resistant to post-translational modification, as for example, due to mutations which alter modification sites (such as tyrosine, threonine, serine or asparagine residues), or which prevent glycosylation of the protein, or which prevent interaction of the protein with intracellular proteins involved in signal transduction.

[0050] The Delta3 polypeptide can comprise a full-length protein, such as represented in SEQ ID NO: 2, 25, 28, 30, 32, 34, 36, 38, 40, 42, 44 or 46, or it can comprise a fragment corresponding to one or more particular motifs/domains (e.g., an extracellular domain, a DSL domain or an EGF-like domain, all of which are described below), or to other sizes, e.g., at least 5, 10, 25, 50, 100, 150, 200, 250, 300, 350, 400, 450, 500, 550, 600 or 650 amino acids in length.

[0051] The polypeptides of the invention can comprise at least one domain or motif of a Delta3 protein, i.e., a domain or motif selected from the group consisting of an amino-terminal signal peptide, a Delta-Serrated lag-2 (DSL) domain, Epidermal Growth Factor (EGF)-like domain 1, EGF-like domain 2, EGF-like domain 3, EGF-like domain 4, EGF-like domain 5, EGF-like domain 6, EGF-like domain 7, EGF-like domain 8, a Delta3 extracellular domain, a transmembrane domain (TM), and a cytoplasmic domain. Other polypeptides comprise soluble Delta3 proteins, e.g., Delta3 proteins comprising at least a portion, such as one or more domains, of the extracellular domain of a Delta3 protein. A soluble Delta3 protein is a protein that is soluble at physiological conditions, and includes but is not limited to a Delta3 protein that does not comprise a transmembrane domain, e.g., an extracellular Delta3 domain. These soluble polypeptides may or may not comprise a signal peptide. Other such polypeptides comprise soluble fusion proteins comprising Delta3 amino acid sequence and a heterologous amino acid sequence, e.g., an immunoglobulin constant region.

[0052] In one embodiment, the isolated polypeptide of the invention lacks both a transmembrane and a cytoplasmic domain. In another embodiment, the polypeptide lacks both a transmembrane domain and a cytoplasmic domain and is soluble under physiological conditions.

[0053] Also within the invention are polypeptides which are allelic variants of a polypeptide that includes the amino acid sequence of any of SEQ ID NOs: 2, 25, 28, 30, 32, 34, 36, 38, 40, 42, 44 or 46, or an amino acid sequence encoded by the cDNA of a clone deposited with the ATCC® as Accession Number 98348, wherein the polypeptide is encoded by a nucleic acid molecule which hybridizes under stringent conditions to a nucleic acid molecule having the sequence of any of SEQ ID NOs:1, 3, 24, 26, 27, 29, 31, 33, 35, 37, 39, 41, 43 or 45, or the nucleotide sequence of the cDNA of a clone deposited with the ATCC® as Accession Number 98348, or a complement thereof.

[0054] Also within the invention are polypeptides which are allelic variants of a polypeptide that includes the amino acid sequence of any of SEQ ID NOs: 2, 25, 28, 30, 32, 34, 36, 38, 40, 42, 44 or 46, or an amino acid sequence encoded by the cDNA of a clone deposited with the ATCC® as Accession Number 98348, wherein the polypeptide is encoded by a nucleic acid molecule which hybridizes under stringent conditions to a nucleic acid molecule having the sequence of any of SEQ ID NOs: 1, 3, 24, 26, 27, 29, 31, 33, 35, 37, 39, 41, 43 or 45, or the nucleotide sequence of the cDNA of a clone deposited with the ATCC® as Accession Number 98348, or a complement thereof, wherein such nucleic acid molecules encode polypeptides or proteins that exhibit at least one structural and/or functional feature of a polypeptide of the invention.

[0055] Another aspect of the invention features fusion proteins comprising a Delta3 amino acid sequence. For instance, the Delta3 protein can be provided as a recombinant fusion protein which includes a second polypeptide portion, e.g., a second polypeptide having an amino acid sequence unrelated (heterologous) to the Delta3 polypeptide, (e.g., the second polypeptide portion is glutathione-S-transferase, an enzymatic sequence such as alkaline phosphatase or an epitope tag).

[0056] Fusion proteins of the invention include, for example, Delta3 immunoglobulin (Delta3-Ig) fusion proteins. For example, a Delta3 fusion protein can comprise the extracellular portion of a Delta3 protein fused to the constant region of an immunoglobulin molecule. Preferred extracellular portions comprise at least one domain selected from the group consisting of a signal peptide, a DSL domain, and the eight EGF-like domains of a Delta3 protein. An even more preferred extracellular domain comprises an amino acid sequence from amino acid 1 to amino acid 529 of SEQ ID NO: 2 or from amino acid 1 to 530 of SEQ ID NO: 25. Yet other preferred Delta3 fusion proteins comprise a portion of a Delta3 protein that is sufficient for binding to a second protein, such as the DSL domain to a second protein which is, for example, a Notch protein.

[0057] Yet another aspect of the present invention concerns an immunogen comprising a Delta3 polypeptide in an immunogenic preparation, the immunogen being capable of eliciting an immune response specific for a Delta3 polypeptide, e.g., a humoral response, an antibody response and/or cellular response. In preferred embodiments, the immunogen comprises an antigenic determinant, e.g., a unique determinant, from the protein represented by SEQ ID NOs: 2, 25, 28, 30, 32, 34, 36, 38, 40, 42, 44 or 46, or the amino acid sequence encoded by the cDNA of a clone deposited with the ATCC® as Accession Number 98348.

[0058] A still further aspect of the present invention features antibodies and antibody preparations specifically reactive with an epitope of the Delta3 protein. In preferred embodiments, the antibody specifically binds to an epitope of a polypeptide shown in SEQ ID NOs: 2, 25, 28, 30, 32, 34, 36, 38, 40, 42, 44 or 46, or the amino acid sequence encoded by the cDNA of a clone deposited with the ATCC® as Accession Number 98348.

[0059] In yet a further aspect, the invention provides substantially purified antibodies or fragments thereof, including human or non-human antibodies or fragments thereof, which antibodies or fragments specifically bind to a polypeptide comprising an amino acid sequence selected from the group consisting of: the amino acid sequence of SEQ ID NOs: 2, 25, 28, 30, 32, 34, 36, 38, 40, 42, 44 or 46, or the amino acid sequence encoded by the cDNA insert of the plasmid deposited with the ATCC® as Accession Number 98348; a fragment of at least 15 amino acid residues of the amino acid sequence of SEQ ID NOs: 2, 25, 28, 30, 32, 34, 36, 38, 40, 42, 44 or 46, or the amino acid sequence encoded by the cDNA of a clone deposited with the ATCC® as Accession Number 98348; an amino acid sequence which is at least 95% identical to the amino acid sequence of SEQ ID NOs: 2, 25, 28, 30, 32, 34, 36, 38, 40, 42, 44 or 46, or the amino acid sequence encoded by the cDNA of a clone deposited with the ATCC® as Accession Number 98348 wherein the percent identity is determined using the ALIGN program of the GCG software package with a PAM120 weight residue table, a gap length penalty of 12, and a gap penalty of 4; and an amino acid sequence which is encoded by a nucleic acid molecule which hybridizes to the nucleic acid molecule consisting of SEQ ID NOs: 1, 3, 24, 26, 27, 29, 31, 33, 35, 37, 39, 41, 43 or 45, or the nucleotide sequence of the cDNA of a clone deposited with the ATCC® as Accession Number 98348, under conditions of hybridization of 6×SSC at 45□C. and washing in 0.2×SSC, 0.1% SDS at 65□C. In various embodiments, the substantially purified antibodies of the invention, or fragments thereof, can be human, non-human, chimeric and/or humanized antibodies.

[0060] In another aspect, the invention provides human or non-human antibodies or fragments thereof, which antibodies or fragments specifically bind to a polypeptide comprising an amino acid sequence selected from the group consisting of: the amino acid sequence of SEQ ID NOs: 2, 25, 28, 30, 32, 34, 36, 38, 40, 42, 44 or 46, or the amino acid sequence encoded by the cDNA insert of the plasmid deposited with the ATCC® as Accession Number 98348; a fragment of at least 15 amino acid residues of the amino acid sequence of SEQ ID NOs: 2, 25, 28, 30, 32, 34, 36, 38, 40, 42, 44 or 46, or the amino acid sequence encoded by the cDNA of a clone deposited with the ATCC® as Accession Number 98348; an amino acid sequence which is at least 95% identical to the amino acid sequence of SEQ ID NOs: 2, 25, 28, 30, 32, 34, 36, 38, 40, 42, 44 or 46, or the amino acid sequence encoded by the cDNA of a clone deposited with the ATCC® as Accession Number 98348 wherein the percent identity is determined using the ALIGN program of the GCG software package with a PAM120 weight residue table, a gap length penalty of 12, and a gap penalty of 4; and an amino acid sequence which is encoded by a nucleic acid molecule which hybridizes to the nucleic acid molecule consisting of SEQ ID NOs: 1, 3, 24, 26, 27, 29, 31, 33, 35, 37, 39, 41, 43 or 45, or the nucleotide sequence of the cDNA of a clone deposited with the ATCC® as Accession Number 98348, under conditions of hybridization of 6×SSC at 45° C. and washing in 0.2×SSC, 0.1% SDS at 65° C. With respect to non-human antibodies, such antibodies can be goat, mouse, sheep, horse, chicken, rabbit, or rat antibodies. Alternatively, the non-human antibodies of the invention can be chimeric and/or humanized antibodies. In addition, the human and non-human antibodies of the invention can be polyclonal antibodies or monoclonal antibodies.

[0061] In still a further aspect, the invention provides monoclonal antibodies or fragments thereof, which antibodies or fragments specifically bind to a polypeptide comprising an amino acid sequence selected from the group consisting of: the amino acid sequence of SEQ ID NOs: 2, 25, 28, 30, 32, 34, 36, 38, 40, 42, 44 or 46, or the amino acid sequence encoded by the cDNA insert of the plasmid deposited with the ATCC® as Accession Number 98348; a fragment of at least 15 amino acid residues of the amino acid sequence of SEQ ID NOs: 2, 25, 28, 30, 32, 34, 36, 38, 40, 42, 44 or 46; an amino acid sequence which is at least 95% identical to the amino acid sequence of SEQ ID NOs: 2, 25, 28, 30, 32, 34, 36, 38, 40, 42, 44 or 46, or the amino acid sequence encoded by the cDNA of a clone deposited with the ATCC® as Accession Number 98348, wherein the percent identity is determined using the ALIGN program of the GCG software package with a PAM120 weight residue table, a gap length penalty of 12, and a gap penalty of 4; and an amino acid sequence which is encoded by a nucleic acid molecule which hybridizes to the nucleic acid molecule consisting of SEQ ID NOs: 1, 3, 24, 26, 27, 29, 31, 33, 35, 37, 39, 41, 43 or 45, or the nucleotide sequence of the cDNA of a clone deposited with the ATCC® as Accession Number 98348, under conditions of hybridization of 6×SSC at 45° C. and washing in 0.2×SSC, 0.1% SDS at 65° C. The monoclonal antibodies can be human, humanized, chimeric and/or non-human antibodies.

[0062] In a particularly preferred embodiment, the substantially purified antibodies or fragments thereof, the human and non-human antibodies or fragments thereof, and/or monoclonal antibodies or fragments thereof, of the invention specifically bind to an extracellular domain of the amino acid sequence of SEQ ID NOs: 2, 25, 28, 30, 32, 34, 36, 38, 40, 42, 44 or 46, or the amino acid sequence encoded by the cDNA of a clone deposited with the ATCC® as Accession Number 98348. Preferably, the extracellular domain to which the antibody, or fragment thereof, binds comprises amino acid residues 1-529 of SEQ ID NO: 2 of human Delta3, or amino acid residues 1-530 of SEQ ID NO: 25 of murine Delta3.

[0063] Any of the antibodies of the invention can be conjugated to a therapeutic moiety or to a detectable substance. Non-limiting examples of detectable substances that can be conjugated to the antibodies of the invention are an enzyme, a prosthetic group, a fluorescent material, a luminescent material, a bioluminescent material, and a radioactive material.

[0064] The invention also provides a kit containing an antibody of the invention and instructions for use. Such kits can also comprise an antibody of the invention conjugated to a detectable substance and instructions for use. Still another aspect of the invention is a pharmaceutical composition comprising an antibody of the invention and a pharmaceutically acceptable carrier. In preferred embodiments, the pharmaceutical composition contains an antibody of the invention, a therapeutic moiety, and a pharmaceutically acceptable carrier.

[0065] In addition, the polypeptides of the invention or biologically active portions thereof, or antibodies of the invention, can be incorporated into pharmaceutical compositions, which optionally include pharmaceutically acceptable carriers.

[0066] The invention also features transgenic non-human animals which include (and preferably express) a heterologous form of a Delta3 gene described herein, or which misexpress (e.g., do not express) an endogenous Delta3 gene (e.g., an animal in which expression of one or more of the subject Delta3 proteins is disrupted). Such a transgenic animal can serve as an animal model for studying cellular or tissue disorders comprising mutated or mis-expressed Delta3 alleles or for use in drug screening. For example, the transgenic animals of the invention can be used as an animal model to study a neurological disease, e.g., ACCPN. Alternatively, such a transgenic animal can be useful for expressing recombinant polypeptides, and for generating cells, e.g., cell lines that can, for example, be utilized as part of screening techniques.

[0067] In another aspect, the invention provides a method for identifying a compound that binds to or modulates the activity of a polypeptide of the invention. In general, such methods entail measuring a biological activity of the polypeptide in the presence and absence of a test compound and identifying those compounds which alter the activity of the polypeptide.

[0068] The invention also features methods for identifying a compound which modulates the expression of a polypeptide or nucleic acid of the invention by measuring the expression of the polypeptide or nucleic acid in the presence and absence of the compound.

[0069] In one embodiment, the invention provides assays, e.g., for screening test compounds to identify agonists, or alternatively, antagonists, of a Delta3 activity. For example, the test compound may positively or negatively influence an interaction between a Delta3 protein and a Delta3 target molecule, for example, a Notch protein. An exemplary method includes the steps of (i) combining a Delta3 polypeptide or active fragment thereof, with a Delta3 target molecule, e.g., Notch, and a test compound, e.g., under conditions wherein, but for the test compound, the Delta3 protein and target molecule are able to interact; and (ii) detecting the formation of a complex which includes the Delta3 protein and the target molecule either by directly quantitating the complex, by measuring inductive effects of the Delta3 protein, or, in the instance of a substrate, measuring the conversion to product. A statistically significant change, such as a decrease, in the interaction of the Delta3 and target molecule in the presence of a test compound (relative to what is detected in the absence of the test compound) is indicative of a modulation (e.g., suppression or potentiation of the interaction between the Delta3 protein and the target molecule).

[0070] The invention provides yet other methods for identifying compounds which modulate a Delta activity. For example, a compound that interacts with a Delta3 protein can be identified by contacting a Delta3 protein with a test compound. Either the test compound or the Delta3 protein can be labeled. Optionally, the non-labeled compound or Delta3 protein can be attached to a solid phase support. Binding of the test compound to the Delta3 protein can then be determined, e.g by measuring the amount of label. Such a Delta3 binding molecule can be an agonist or an antagonist. In one embodiment, an agonist of a Delta3 activity is identified by contacting a cell having a Delta3 protein with a test compound and measuring a Delta3 activity, e.g., expression of a gene which is regulated by binding of a protein, e.g., a Notch protein, to Delta3. An increased expression of the gene when the cell is incubated with the test compound relative to incubation in the absence of the test compound indicates that the test compound is a Delta3 agonist. The gene that is monitored can also be a reporter gene transfected to a cell, the reporter gene being under the control of a promoter of a gene which is regulated by Delta3.

[0071] In another aspect, the invention provides methods for modulating activity of a polypeptide of the invention comprising contacting a cell with an agent that modulates (inhibits or stimulates) the activity or expression of a polypeptide of the invention such that activity or expression in the cell is modulated. In one embodiment, the agent is an antibody that specifically binds to a polypeptide of the invention.

[0072] In another embodiment, the agent modulates expression of a polypeptide of the invention by modulating transcription, splicing, or translation of an mRNA encoding a polypeptide of the invention. In yet another embodiment, the agent is a nucleic acid molecule having a nucleotide sequence that is antisense to the coding strand of an mRNA encoding a polypeptide of the invention.

[0073] Yet another aspect of the present invention concerns methods for treating diseases or conditions that are caused or contributed to by an aberrant Delta3 expression, level, or activity, e.g., aberrant cell proliferation, degeneration or differentiation, in a subject, by administering to the subject an effective amount of a modulator (e.g., an agonist or antagonist) of a Delta3 activity. In one embodiment, an agonist or antagonist can modulate Delta3 protein levels, by, e.g., modulating expression of a Delta3 gene. A modulator can, for example, be a protein of the invention, or, alternatively, a nucleic acid of the invention. In other embodiments, the modulator is a peptide, antibody, peptidomimetic, or other small organic molecule. For example, administration of a therapeutic comprised of a Delta3 agonist can be useful for promoting the tissue regeneration or repair needed to effectively treat a nerve injury, neurodegenerative disease, or neurodevelopmental disorder including but not limited to peripheral neuropathies, e.g., ACCPN, stroke, dementia, Alzheimer's disease, Parkinson's disease, Huntington's chorea, amylotrophic lateral sclerosis, and the like, as well as spinocerebellar degenerations.

[0074] Alternatively, administration of a Delta3 antagonist may be to effectively treat a neoplastic or hyperplastic disease, particularly of endothelial tissue.

[0075] Additionally, Delta3 agonists or antagonists may be used to treat various hematologic abnormalities such as neutropenia seen in patients undergoing chemotherapy, or immunodeficiency disorders such as AIDS. Delta3 nucleic acids, polypeptides or modulators thereof can also be utilized in treating or ameliorating a symptom of obesity and/or disorders that accompany or are exacerbated by an obese state, such as cardiovascular and circulatory disorders, metabolic abnormalities typical of obesity, such as hyperinsulinemia, insulin resistance, diabetes, including non-insulin dependent diabetes mellitus (NIDDM), insulin dependent diabetes mellitus (IDDM), and maturity onset diabetes of the young (MODY), disorders of energy homeostasis, disorders associated with lipid metabolism, such as cachexia, disorders associated with abnormal vasculogenesis (e.g., cancers, including, but not limited to, cancers of the epithelia (e.g., carcinomas of the pancreas, stomach, liver, secretory glands (e.g., adenocarcinoma), bladder, lung, breast, skin (e.g., fibromatosis or malignant melanoma), reproductive tract including prostate gland, ovary, cervix and uterus); cancers of the hematopoietic and immune system (e.g., leukemias and lymphomas); cancers of the central nervous, brain system and eye (e.g., gliomas, neuroblastoma and retinoblastoma); and cancers of connective tissues, bone, muscles and vasculature (e.g., hemangiomas and sarcomas)), disorders related to fetal development, in particular, disorders involving development of lung and kidney, lung-related disorders, atherosclerosis, e.g., the initiation and progression of atherosclerosis; and inflammatory-related disorders, e.g., asthma, allergy, and autoimmune disorders, neurological disorders, including developmental, cognitive and personality-related disorders, renal disorders, adrenal gland-related disorders; and disorders relating to skeletal muscle, such as dystrophic disorders.

[0076] The invention also provides methods for treating diseases or conditions associated with one or more specific Delta alleles, e.g., mutant allele, comprising administering to the subject an effective amount of a therapeutic compound. In one embodiment, the therapeutic compound is capable of compensating for the effect of the specific Delta allele. In another embodiment, the therapeutic compound is capable of modulating a Delta3 activity. In a one embodiment, the Delta allele is a Delta3 allele. For example, in one embodiment, the disease or condition is a neurological disease, e.g., ACCPN.

[0077] A further aspect of the present invention provides a method for determining whether a subject is at risk for developing a disease or condition, which is caused by or contributed to by an aberrant Delta3 activity, e.g. aberrant cell proliferation, degeneration or differentiation. In one embodiment, the disease or condition is a neurological disease, e.g., ACCPN. The method includes detecting, in a tissue of the subject, the presence or absence of a genetic lesion characterized by at least one of (i) a mutation of a gene encoding a Delta3 protein, e.g., as shown in SEQ ID Nos: 1, 3, 24, 26, 27, 29, 31, 33, 35, 37, 39, 41, 43 or 45, or the nucleotide sequence of the cDNA of a clone deposited with the ATCC® as Accession Number 98348, or a homolog thereof; or (ii) the mis-expression of a Delta3 gene. In one embodiments, detecting the genetic lesion includes ascertaining the existence of at least one of the following: a deletion of one or more nucleotides from a Delta3 gene; an addition of one or more nucleotides to the gene, a substitution of one or more nucleotides of the gene, a gross chromosomal rearrangement of the gene; an alteration in the level of a messenger RNA transcript of the gene; the presence of a non-wild type splicing pattern of a messenger RNA transcript of the gene; and/or a non-wild type level of the protein.

[0078] In a preferred embodiment, the invention provides a method for determining whether a subject has or is at risk of developing a disease or condition associated with a specific Delta3 allele, comprising determining the identity of a Delta3 allele in the subject. In an even more preferred embodiment, the disease or condition is a neurological disease, e.g., ACCPN. In another preferred embodiment, the disease is a vascular disorder. In another preferred embodiment, the disease is a neoplastic disorder. In another preferred embodiment the disease is a hematologic disorder. In another preferred embodiment the disease is an immunodeficiency disorder.

[0079] For example, detecting the genetic lesion or determining the identity of a Delta allele, e.g., a Delta3 allele, can include: (i) providing a probe/primer comprised of an oligonucleotide which hybridizes to a sense or antisense sequence of a Delta3 gene or naturally-occurring mutants thereof, or 5′ or 3′ flanking sequences naturally associated with the Delta3 gene; (ii) contacting the probe/primer with an appropriate nucleic acid containing sample; and (iii) detecting, by hybridization of the probe/primer to the nucleic acid, the presence or absence of the genetic lesion, e.g., by utilizing the probe/primer to determine the nucleotide sequence of the Delta3 gene and, optionally, of the flanking nucleic acid sequences. For instance, the primer can be employed in a polymerase chain reaction (PCR) or in a ligation chain reaction (LCR).

[0080] In another diagnostic method of the invention, at least a portion of a Delta3 gene of a subject is sequenced and the nucleotide sequence is compared to that of a wild-type Delta3 gene, to determine the presence of a genetic lesion. Another preferred diagnostic method of the invention is single strand conformation polymorphism (SSCP) which detects differences in electrophoretic mobility between mutant and wild-type nucleic acids.

[0081] In alternate embodiments, the diagnostic methods comprise determining the level of a Delta3 protein in an immunoassay using an antibody which is specifically immunoreactive with a wildtype or mutant Delta3 protein.

[0082] In another aspect, the present invention provides methods for detecting the presence of the activity or expression of a polypeptide of the invention in a biological sample by contacting the biological sample with an agent capable of detecting an indicator of activity such that the presence of activity is detected in the biological sample.

[0083] The present invention also provides diagnostic assays for identifying the presence or absence of a genetic lesion or mutation characterized by at least one of: (i) aberrant modification or mutation of a gene encoding a polypeptide of the invention, (ii) mis-regulation of a gene encoding a polypeptide of the invention, and (iii) aberrant post-translational modification of a polypeptide of the invention wherein a wild-type form of the gene encodes a polypeptide having the activity of the polypeptide of the invention.

[0084] Other features and advantages of the invention will be apparent from the following detailed description and claims.

### FTHMA-070 and TANGO85

[0085] The present invention is based, at least in part, on the discovery of a gene encoding FTHMA-070, a protein having homology to tumor necrosis factor (TNF) receptor and on the discovery of a gene encoding T85 (also referred to as FMHB-SD4 or FMHB-6D4).

[0086] The FTHMA-070 cDNA described below (SEQ ID NO:53) has a 1203 nucleotide open reading frame (nucleotides 73-1275 of SEQ ID NO:53; SEQ ID NO:55) which encodes a 403 amino acid protein (SEQ ID NO:54). This protein includes a predicted signal sequence of about 21 amino acids (from amino acid 1 to about amino acid 21 of SEQ ID NO:54) and a predicted mature protein of about 382 amino acids (from about amino acid 22 to amino acid 403 of SEQ ID NO:54; SEQ ID NO:56).

[0087] The T85 cDNA described below (SEQ ID NO:57) has a 2259 nucleotide open reading frame (nucleotides 958-3216 of SEQ ID NO:57; SEQ ID NO:59) which encodes a 753 amino acid protein (SEQ ID NO:58). This protein includes a predicted signal sequence of about 20 amino acids (from amino acid 1 to about amino acid 20 of SEQ ID NO:58) and a predicted mature protein of about 733 amino acids (from about amino acid 21 to amino acid 753 of SEQ ID NO:58; SEQ ID NO:60).

[0088] The nucleic acid and polypeptide molecules of the present invention are useful as modulating agents in regulating a variety of cellular processes. Accordingly, in one aspect, this invention provides isolated nucleic acid molecules encoding FTHMA-070 proteins or biologically active portions thereof, as well as nucleic acid fragments suitable as primers or hybridization probes for the detection of FTHMA-070-encoding nucleic acids. In another aspect, this invention provides isolated nucleic acid molecules encoding T85 proteins or biologically active portions thereof, as well as nucleic acid fragments suitable as primers or hybridization probes for the detection of T85-encoding nucleic acids.

[0089] The invention features a nucleic acid molecule which is at least 45% (or 55%, 65%, 75%, 85%, 95%, or 98%) identical to the nucleotide sequence shown in SEQ ID NO:53, or SEQ ID NO:55, or a complement thereof. The invention features a nucleic acid molecule which includes a fragment of at least 300 (325, 350, 375, 400, 425, 450, 500, 550, 600, 650, 700, 800, 900, 1000, or 1290) nucleotides of the nucleotide sequence shown in SEQ ID NO:53, or SEQ ID NO:55, or a complement thereof.

[0090] The invention also features a nucleic acid molecule which includes a nucleotide sequence encoding a protein having an amino acid sequence that is at least 45% (or 55%, 65%, 75%, 85%, 95%, or 98%) identical to the amino acid sequence of SEQ ID NO:54, SEQ ID NO:56. In a preferred embodiment, a FTHMA-070 nucleic acid molecule has the nucleotide sequence shown SEQ ID NO:53, or SEQ ID NO:55.

[0091] Also within the invention is a nucleic acid molecule which encodes a fragment of a polypeptide having the amino acid sequence of SEQ ID NO:54 or SEQ ID NO:56, the fragment including at least 15 (25, 30, 50, 100, 150, 300, or 400) contiguous amino acids of SEQ ID NO:54 or SEQ ID NO:56.

[0092] The invention includes a nucleic acid molecule which encodes a naturally occurring allelic variant of a polypeptide comprising the amino acid sequence of SEQ ID NO:54 or SEQ ID NO:56, wherein the nucleic acid molecule hybridizes to a nucleic acid molecule comprising SEQ ID NO:53 or SEQ ID NO:55 under stringent conditions.

[0093] Also within the invention are: an isolated FTHMA-070 protein having an amino acid sequence that is at least about 65%, preferably 75%, 85%, 95%, or 98% identical to the amino acid sequence of SEQ ID NO:56 (mature human FTHMA-070) or the amino acid sequence of SEQ ID NO:54 (immature human FTHMA-070).

[0094] Also within the invention are: an isolated FTHMA-070 protein which is encoded by a nucleic acid molecule having a nucleotide sequence that is at least about 65%, preferably 75%, 85%, or 95% identical to SEQ ID NO:55; and an isolated FTHMA-070 protein which is encoded by a nucleic acid molecule having a nucleotide sequence which hybridizes under stringent hybridization conditions to a nucleic acid molecule having the nucleotide sequence of SEQ ID NO:55.

[0095] Also within the invention is a polypeptide which is a naturally occurring allelic variant of a polypeptide that includes the amino acid sequence of SEQ ID NO:54 or SEQ ID NO:56, wherein the polypeptide is encoded by a nucleic acid molecule which hybridizes to a nucleic acid molecule comprising SEQ ID NO:53 or SEQ ID NO:55 under stringent conditions.

[0096] Another embodiment of the invention features FTHMA-070 nucleic acid molecules which specifically detect FTHMA-070 nucleic acid molecules. For example, in one embodiment, a FTHMA-070 nucleic acid molecule hybridizes under stringent conditions to a nucleic acid molecule comprising the nucleotide sequence of SEQ ID NO:53, SEQ ID NO:55, or a complement thereof. In another embodiment, the FTHMA-070 nucleic acid molecule is at least 300 (325, 350, 375, 400, 425, 450, 500, 550, 600, 650, 700, 800, 900, 1000, or 1200) nucleotides in length and hybridizes under stringent conditions to a nucleic acid molecule comprising the nucleotide sequence shown in SEQ ID NO:53 or SEQ ID NO:55, or a complement thereof. In another embodiment, the invention provides an isolated nucleic acid molecule which is antisense to the coding strand of a FTHMA-070 nucleic acid.

[0097] Another aspect of the invention provides a vector, e.g., a recombinant expression vector, comprising a FTHMA-070 nucleic acid molecule of the invention. In another embodiment the invention provides a host cell containing such a vector. The invention also provides a method for producing FTHMA-070 protein by culturing, in a suitable medium, a host cell of the invention containing a recombinant expression vector such that a FTHMA-070 protein is produced.

[0098] Another aspect of this invention features isolated or recombinant FTHMA-070 proteins and polypeptides. Preferred FTHMA-070 proteins and polypeptides possess at least one biological activity possessed by naturally occurring human FTHMA-070, e.g., the ability to form protein:protein interactions with other proteins.

[0099] The FTHMA-070 proteins of the present invention, or biologically active portions thereof, can be operatively linked to a non-FTHMA-070 polypeptide (e.g., heterologous amino acid sequences) to form FTHMA-070 fusion proteins. The invention further features antibodies that specifically bind FTHMA-070 proteins, such as monoclonal or polyclonal antibodies. In addition, the FTHMA-070 proteins or biologically active portions thereof can be incorporated into pharmaceutical compositions, which optionally include pharmaceutically acceptable carriers.

[0100] In another aspect, the present invention provides a method for detecting the presence of FTHMA-070 activity or expression in a biological sample by contacting the biological sample with an agent capable of detecting an indicator of FTHMA-070 activity such that the presence of FTHMA-070 activity is detected in the biological sample.

[0101] In another aspect, the invention provides a method for modulating FTHMA-070 activity comprising contacting a cell with an agent that modulates (inhibits or stimulates) FTHMA-070 activity or expression such that FTHMA-070 activity or expression in the cell is modulated. In one embodiment, the agent is an antibody that specifically binds to FTHMA-070 protein. In another embodiment, the agent modulates expression of FTHMA-070 by modulating transcription of a FTHMA-070 gene, splicing of a FTHMA-070 mRNA, or translation of a FTHMA-070 mRNA. In yet another embodiment, the agent is a nucleic acid molecule having a nucleotide sequence that is antisense to the coding strand of the FTHMA-070 mRNA or the FTHMA-070 gene.

[0102] In one embodiment, the methods of the present invention are used to treat a subject having a disorder characterized by aberrant FTHMA-070 protein or nucleic acid expression or activity by administering an agent which is a FTHMA-070 modulator to the subject. In one embodiment, the FTHMA-070 modulator is a FTHMA-070 protein. In another embodiment the FTHMA-070 modulator is a FTHMA-070 nucleic acid molecule. In other embodiments, the FTHMA-070 modulator is a peptide, peptidomimetic, or other small molecule.

[0103] The present invention also provides a diagnostic assay for identifying the presence or absence of a genetic lesion or mutation characterized by at least one of: (i) aberrant modification or mutation of a gene encoding a FTHMA-070 protein; (ii) mis-regulation of a gene encoding a FTHMA-070 protein; and (iii) aberrant post-translational modification of a FTHMA-070 protein, wherein a wild-type form of the gene encodes a protein with a FTHMA-070 activity.

[0104] In another aspect, the invention provides a method for identifying a compound that binds to or modulates the activity of a FTHMA-070 protein. In general, such methods entail measuring a biological activity of a FTHMA-070 protein in the presence and absence of a test compound and identifying those compounds which alter the activity of the FTHMA-070 protein.

[0105] The invention also features methods for identifying a compound which modulates the expression of FTHMA-070 by measuring the expression of FTHMA-070 in the presence and absence of a compound.

[0106] The invention features a nucleic acid molecule which is at least 45% (or 55%, 65%, 75%, 85%, 95%, or 98%) identical to the nucleotide sequence shown in SEQ ID NO:57, or SEQ ID NO:59, or a complement thereof. The invention features a nucleic acid molecule which includes a fragment of at least 300 (325, 350, 375, 400, 425, 450, 500, 550, 600, 650, 700, 800, 900, 1000, or 1290) nucleotides of the nucleotide sequence shown in SEQ ID NO:57, or SEQ ID NO:59, or a complement thereof.

[0107] The invention also features a nucleic acid molecule which includes a nucleotide sequence encoding a protein having an amino acid sequence that is at least 45% (or 55%, 65%, 75%, 85%, 95%, or 98%) identical to the amino acid sequence of SEQ ID NO:58 or SEQ ID NO:60. In a preferred embodiment, a T85 nucleic acid molecule has the nucleotide sequence shown SEQ ID NO:57, or SEQ ID NO:59.

[0108] Also within the invention is a nucleic acid molecule which encodes a fragment of a polypeptide having the amino acid sequence of SEQ ID NO:58 or SEQ ID NO:60, the fragment including at least 15 (25, 30, 50, 100, 150, 300, or 400) contiguous amino acids of SEQ ID NO:58 or SEQ ID NO:60.

[0109] The invention includes a nucleic acid molecule which encodes a naturally occurring allelic variant of a polypeptide comprising the amino acid sequence of SEQ ID NO:58 or SEQ ID NO:60, wherein the nucleic acid molecule hybridizes to a nucleic acid molecule comprising SEQ ID NO:57 or SEQ ID NO:59 under stringent conditions.

[0110] Also within the invention are: an isolated T85 protein having an amino acid sequence that is at least about 65%, preferably 75%, 85%, 95%, or 98% identical to the amino acid sequence of SEQ ID NO:60 (mature human T85) or the amino acid sequence of SEQ ID NO:58 (immature human T85); and an isolated T85 protein having an amino acid sequence that is at least about 85%, 95%, or 98% identical to one or more of the fibronectin type III domains and Ig superfamily domains described herein.

[0111] Also within the invention are: an isolated T85 protein which is encoded by a nucleic acid molecule having a nucleotide sequence that is at least about 65%, preferably 75%, 85%, or 95% identical to SEQ ID NO:59; an isolated T85 protein which is encoded by a nucleic acid molecule having a nucleotide sequence at least about 65% preferably 75%, 85%, or 95% identical a fibronectin III or Ig superfamily domain encoding portion of SEQ ID NO:57; and an isolated T85 protein which is encoded by a nucleic acid molecule having a nucleotide sequence which hybridizes under stringent hybridization conditions to a nucleic acid molecule having the nucleotide sequence of SEQ ID NO:59.

[0112] Also within the invention is a polypeptide which is a naturally occurring allelic variant of a polypeptide that includes the amino acid sequence of SEQ ID NO:58 or SEQ ID NO:60, wherein the polypeptide is encoded by a nucleic acid molecule which hybridizes to a nucleic acid molecule comprising SEQ ID NO:57 or SEQ ID NO:59 under stringent conditions.

[0113] Another embodiment of the invention features T85 nucleic acid molecules which specifically detect T85 nucleic acid molecules. For example, in one embodiment, a T85 nucleic acid molecule hybridizes under stringent conditions to a nucleic acid molecule comprising the nucleotide sequence of SEQ ID NO:57 or SEQ ID NO:59, or a complement thereof. In another embodiment, the T85 nucleic acid molecule is at least 300 (325, 350, 375, 400, 425, 450, 500, 550, 600, 650, 700, 800, 900, 1000, or 1290) nucleotides in length and hybridizes under stringent conditions to a nucleic acid molecule comprising the nucleotide sequence shown in SEQ ID NO:57 or SEQ ID NO:59, or a complement thereof. In a preferred embodiment, an isolated T85 nucleic acid molecule comprises a nucleotide sequence of SEQ ID NO:57 which encodes a fibronectin type III domain, or a complement thereof. In another preferred embodiment, an isolated T85 nucleic acid molecule comprises a nucleotide of SEQ ID NO:57 which encodes an Ig superfamily domain, or a complement thereof. In another embodiment, the invention provides an isolated nucleic acid molecule which is antisense to the coding strand of a T85 nucleic acid.

[0114] Another aspect of the invention provides a vector, e.g., a recombinant expression vector, comprising a T85 nucleic acid molecule of the invention. In another embodiment the invention provides a host cell containing such a vector. The invention also provides a method for producing T85 protein by culturing, in a suitable medium, a host cell of the invention containing a recombinant expression vector such that a T85 protein is produced.

[0115] Another aspect of this invention features isolated or recombinant T85 proteins and polypeptides. Preferred T85 proteins and polypeptides possess at least one biological activity possessed by naturally occurring human T85, e.g., the ability to form protein:protein interactions with other proteins.

[0116] The T85 proteins of the present invention, or biologically active portions thereof, can be operatively linked to a non-T85 polypeptide (e.g., heterologous amino acid sequences) to form T85 fusion proteins. The invention further features antibodies that specifically bind T85 proteins, such as monoclonal or polyclonal antibodies. In addition, the T85 proteins or biologically active portions thereof can be incorporated into pharmaceutical compositions, which optionally include pharmaceutically acceptable carriers.

[0117] In another aspect, the present invention provides a method for detecting the presence of T85 activity or expression in a biological sample by contacting the biological sample with an agent capable of detecting an indicator of T85 activity such that the presence of T85 activity is detected in the biological sample.

[0118] In another aspect, the invention provides a method for modulating T85 activity comprising contacting a cell with an agent that modulates (inhibits or stimulates) T85 activity or expression such that T85 activity or expression in the cell is modulated. In one embodiment, the agent is an antibody that specifically binds to T85 protein. In another embodiment, the agent modulates expression of T85 by modulating transcription of a T85 gene, splicing of a T85 mRNA, or translation of a T85 mRNA. In yet another embodiment, the agent is a nucleic acid molecule having a nucleotide sequence that is antisense to the coding strand of the T85 mRNA or the T85 gene.

[0119] In one embodiment, the methods of the present invention are used to treat a subject having a disorder characterized by aberrant T85 protein or nucleic acid expression or activity by administering an agent which is a T85 modulator to the subject. In one embodiment, the T85 modulator is a T85 protein. In another embodiment the T85 modulator is a T85 nucleic acid molecule. In other embodiments, the T85 modulator is a peptide, peptidomimetic, or other small molecule.

[0120] The present invention also provides a diagnostic assay for identifying the presence or absence of a genetic lesion or mutation characterized by at least one of: (i) aberrant modification or mutation of a gene encoding a T85 protein; (ii) mis-regulation of a gene encoding a T85 protein; and (iii) aberrant post-translational modification of a T85 protein, wherein a wild-type form of the gene encodes a protein with a T85 activity.

[0121] In another aspect, the invention provides a method for identifying a compound that binds to or modulates the activity of a T85 protein. In general, such methods entail measuring a biological activity of a T85 protein in the presence and absence of a test compound and identifying those compounds which alter the activity of the T85 protein.

[0122] The invention also features methods for identifying a compound which modulates the expression of T85 by measuring the expression of T85 in the presence and absence of a compound.

### TANGO 77

[0123] The present invention is based, at least in part, on the discovery of a gene encoding Tango-77, a secreted protein that is predicted to be a member of the cytokine superfamily. The Tango-77 cDNA described below (SEQ ID NO:71) has three possible open reading frames. The first potential open reading frame encompasses 534 nucleotides extending from nucleotide 356 to nucleotide 889 of SEQ ID NO:71 (SEQ ID NO:73) and encodes a 178 amino acid protein (SEQ ID NO:72). This protein may include a predicted signal sequence of about 63 amino acids (from about amino acid 1 to about amino acid 63 of SEQ ID NO:72 (SEQ ID NO:74) and a predicted mature protein of about 115 amino acids (from about amino acid 64 to amino acid 178 of SEQ ID NO:72 (SEQ ID NO:75)).

[0124] The second potential open reading frame encompasses 498 nucleotides extending from nucleotide 389 to nucleotide 889 of SEQ ID NO:71 (SEQ ID NO:76) and encodes a 167 amino acid protein (SEQ ID NO:77). This protein may include a predicted signal sequence of about 52 amino acids (from about amino acid 1 to about amino acid 52 of SEQ ID NO:77 (SEQ ID NO:78)) and a predicted mature protein of about 115 amino acids (from about amino acid 52 to amino acid 167 of SEQ ID NO:77 (SEQ ID NO:79)).

[0125] The third potential open reading frame encompasses 408 nucleotides extending from nucleotide 481 to nucleotide 889 of SEQ ID NO:71 (SEQ ID NO:80) and encodes a 136 amino acid protein (SEQ ID NO:81). This protein includes a predicted signal sequence of about 21 amino acids (from about amino acid 1 to about amino acid 21 of SEQ ID NO:81 (SEQ ID NO:82)) and a predicted mature protein of about 115 amino acids (from about amino acid 22 to amino acid 136 of SEQ ID NO:81 (SEQ ID NO:83)).

[0126] As used herein, the terms “Tango-77”, “Tango-77 protein”, “Tango-77 polypeptide” and the like, can refer and polypeptide produced by the cDNA of SEQ ID NO:71 including any and all of the Tango-77 gene products described above.

[0127] Tango-77 is expected to inhibit inflammation and play a functional role similar to that of secreted IL-1ra. For example, it is expected that Tango-77 may bind to the IL-1 receptor, thus blocking receptor activation by inhibiting the binding of IL-1α and IL-1β to the receptor. Alternatively, Tango-77 may inhibit inflammation through another pathway, for example, by binding to a novel receptor. Accordingly, Tango-77 may be useful as a modulating agent in regulating a variety of cellular processes including acute and chronic inflammation, e.g., asthma, chronic myelogenous leukemia, rheumatoid arthritis, psoriasis and inflammatory bowel disease.

[0128] In one aspect, the invention provides isolated nucleic acid molecules encoding Tango-77 or biologically active portions thereof, as well as nucleic acid fragments suitable as primers or hybridization probes for the detection of Tango-77.

[0129] The invention encompasses methods of diagnosing and treating patients who are suffering from a disorder associated with an abnormal level (undesirably high or undesirably low) of inflammation, abnormal activity of the IL-1 receptor complex, or abnormal activity of IL-1, by administering a compound that modulates the expression of Tango-77 (at the DNA, mRNA or protein level, e.g., by altering mRNA splicing) or by altering the activity of Tango-77. Examples of such compounds include small molecules, antisense nucleic acid molecules, ribozymes, and polypeptides.

[0130] The invention features a nucleic acid molecule which is at least 45% (e.g., 55%, 65%, 75%, 85%, 95%, or 98%) identical to the nucleotide sequence shown in SEQ ID NO:71, SEQ ID NO:73, SEQ ID NO:76, SEQ ID NO:80, the nucleotide sequence of the cDNA insert of the plasmid deposited with ATCC as Accession Number (the “cDNA of ATCC 98807”), or a complement thereof.

[0131] The invention features a nucleic acid molecule which includes a fragment of at least 100 (e.g., 250, 325, 350, 375, 400, 425, 450, 500, 550, 600, 650, 700, 800, 900, or 989) nucleotides of the nucleotide sequence shown in SEQ ID NO:71, SEQ ID NO:73, SEQ ID NO:76, SEQ ID NO:80, the nucleotide sequence of the cDNA ATCC 98807, or a complement thereof.

[0132] The invention also features a nucleic acid molecule which includes a nucleotide sequence encoding a protein having an amino acid sequence that is at least 45% (55%, 65%, 75%, 85%, 95%, or 98%) identical to the amino acid sequence of SEQ ID NO:72, SEQ ID NO:75, SEQ ID NO:77, SEQ ID NO:79, SEQ ID NO:81, SEQ ID NO:83, or the amino acid sequence encoded by the cDNA of ATCC 98807.

[0133] In a preferred embodiment, a Tango-77 nucleic acid molecule has the nucleotide sequence shown in SEQ ID NO:71, SEQ ID NO:73, SEQ ID NO:76, SEQ ID NO:80 or the nucleotide sequence of the cDNA of ATCC 98807.

[0134] Also within the invention is a nucleic acid molecule which encodes a fragment of a polypeptide having the amino acid sequence of SEQ ID NO:72, SEQ ID NO:74, SEQ ID NO:75, SEQ ID NO:77, SEQ ID NO:78, SEQ ID NO:79, SEQ ID NO:81, SEQ ID NO:82, SEQ ID NO:83, wherein the fragment includes at least 15 (e.g., 25, 30, 50, 100, 150, or 178) contiguous amino acids of SEQ ID NO:72, SEQ ID NO:74, SEQ ID NO:75, SEQ ID NO:77, SEQ ID NO:78, SEQ ID NO:79, SEQ ID NO:81, SEQ ID NO:82, SEQ ID NO:83, or the polypeptide encoded by the cDNA of ATCC Accession Number 98807.

[0135] The invention includes a nucleic acid molecule which encodes a naturally occurring allelic variant of a polypeptide comprising the amino acid sequence of SEQ ID NO:72, SEQ ID NO:74, SEQ ID NO:75, SEQ ID NO:77, SEQ ID NO:78, SEQ ID NO:79, SEQ ID NO:81, SEQ ID NO:82, SEQ ID NO:83, or an amino acid sequence encoded by the cDNA of ATCC Accession Number 98807, wherein the nucleic acid molecule hybridizes to a nucleic acid molecule comprising SEQ ID NO:71, SEQ ID NO:73, SEQ ID NO:76, SEQ ID NO:80, or a complement thereof under stringent conditions.

[0136] Also within the invention are: an isolated Tango-77 protein having an amino acid sequence that is at least about 45%, preferably 65%, 75%, 85%, 95%, or 98% identical to the amino acid sequence of SEQ ID NO:75, SEQ ID NO:79 or SEQ ID NO:83 (mature human Tango-77), or the amino acid sequence of SEQ ID NO:72, SEQ ID NO:77 or SEQ ID NO:81 (immature human Tango-77).

[0137] Also within the invention are: an isolated Tango-77 protein which is encoded by a nucleic acid molecule having a nucleotide sequence that is at least about 65%, preferably 75%, 85%, or 95% identical to SEQ ID NO:73, SEQ ID NO:76, SEQ ID NO:80 or the cDNA of ATCC 98807; and an isolated Tango-77 protein which is encoded by a nucleic acid molecule having a nucleotide sequence which hybridizes under stringent hybridization conditions to a nucleic acid molecule having the nucleotide sequence of SEQ ID NO:73, SEQ ID NO:76, SEQ ID NO:80, the non-coding strand of the cDNA of ATCC 98807, or the complement thereof.

[0138] Also within the invention is a polypeptide which is a naturally occurring allelic variant of a polypeptide that includes the amino acid sequence of SEQ ID NO:72, SEQ ID NO:74, SEQ ID NO:75, SEQ ID NO:77, SEQ ID NO:78, SEQ ID NO:79, SEQ ID NO:81, SEQ ID NO:82, SEQ ID NO:83, or an amino acid sequence encoded by the cDNA insert of the plasmid deposited with ATCC as Accession Number 98807, wherein the polypeptide is encoded by a nucleic acid molecule which hybridizes to a nucleic acid molecule comprising SEQ ID NO:71, SEQ ID NO:73, SEQ ID NO:76, SEQ ID NO:80 or the complement thereof under stringent conditions.

[0139] Another embodiment of the invention features Tango-77 nucleic acid molecules which specifically detect Tango-77 nucleic acid molecules relative to nucleic acid molecules encoding other members of the cytokine superfamily. For example, in one embodiment, a Tango-77 nucleic acid molecule hybridizes under stringent conditions to a nucleic acid molecule comprising the nucleotide sequence of SEQ ID NO:71, SEQ ID NO:73, SEQ ID NO:76, SEQ ID NO:80, the cDNA of ATCC 98807, or a complement thereof. In another embodiment, the Tango-77 nucleic acid molecule is at least 300 (325, 350, 375, 400, 425, 450, 500, 550, 600, 650, 700, 800, 900, or 989) nucleotides in length and hybridizes under stringent conditions to a nucleic acid molecule comprising the nucleotide sequence shown in SEQ ID NO:71, SEQ ID NO:73, SEQ ID NO:76, SEQ ID NO:80, the cDNA of ATCC 98807, or a complement thereof. In yet another embodiment, the invention provides an isolated nucleic acid molecule which is antisense to the coding strand of a Tango-77 nucleic acid.

[0140] Another aspect of the invention provides a vector, e.g., a recombinant expression vector, comprising a Tango-77 nucleic acid molecule of the invention. In another embodiment, the invention provides a host cell containing such a vector. The invention also provides a method for producing Tango-77 protein by culturing, in a suitable medium, a host cell of the invention containing a recombinant expression vector such that a Tango-77 protein is produced.

[0141] Another aspect of this invention features isolated or recombinant Tango-77 proteins and polypeptides. Preferred Tango-77 proteins and polypeptides possess at least one biological activity possessed by naturally occurring human Tango-77, e.g., (i) the ability to interact with proteins in the Tango-77 signalling pathway (ii) the ability to interact with a Tango-77 ligand or receptor; or (iii) the ability to interact with an intracellular target protein, (iv) the ability to interact with a protein involved in inflammation and (v) the ability to bind the IL-1 receptor. Other activities include the induction and suppression of polypeptide interleukins, cytokines and growth factors.

[0142] The Tango-77 proteins of the present invention, or biologically active portions thereof, can be operably linked to a non-Tango-77 polypeptide (e.g., heterologous amino acid sequences) to form Tango-77 fusion proteins. The invention further features antibodies that specifically bind Tango-77 proteins, such as monoclonal or polyclonal antibodies. In addition, the Tango-77 proteins or biologically active portions thereof can be incorporated into pharmaceutical compositions, which optionally include pharmaceutically acceptable carriers.

[0143] In another aspect, the present invention provides a method for detecting the presence of Tango-77 activity or expression in a biological sample by contacting the biological sample with an agent capable of detecting an indicator of Tango-77 activity or expression such that the presence of Tango-77 activity or expression is detected in the biological sample.

[0144] In another aspect, the invention provides a method for modulating Tango-77 activity comprising contacting a cell with an agent that modulates (inhibits or stimulates)

[0145] Tango-77 activity or expression such that Tango-77 activity or expression in the cell is modulated. In one embodiment, the agent is an antibody that specifically binds to Tango-77 protein. In another embodiment, the agent modulates expression of Tango-77 by modulating transcription of a Tango-77 gene, splicing of a Tango-77 mRNA, or translation of a Tango-77 mRNA. In yet another embodiment, the agent is a nucleic acid molecule having a nucleotide sequence that is antisense to the coding strand of the Tango-77 mRNA or the Tango-77 gene.

[0146] In one embodiment, the methods of the present invention are used to treat a subject having a disorder characterized by aberrant Tango-77 protein activity or nucleic acid expression by administering an agent which is a Tango-77 modulator to the subject. In one embodiment, the Tango-77 modulator is a Tango-77 protein. In another embodiment, the Tango-77 modulator is a Tango-77 nucleic acid molecule. In other embodiments, the Tango-77 modulator is a peptide, peptidomimetic, or other small molecule. In a preferred embodiment, the disorder characterized by aberrant Tango-77 protein or nucleic acid expression can include chronic and acute inflammation.

[0147] The present invention also provides a diagnostic assay for identifying the presence or absence of a genetic lesion or mutation characterized by at least one of: (i) aberrant modification or mutation of a gene encoding a Tango-77 protein; (ii) mis-regulation of a gene encoding a Tango-77 protein; and (iii) aberrant post-translational modification of a Tango-77 protein, wherein a wild-type form of the gene encodes a protein with a Tango-77 activity.

[0148] In another aspect, the invention provides a method for identifying a compound that binds to or modulates the activity of a Tango-77 protein. In general, such methods entail measuring a biological activity of a Tango-77 protein in the presence and absence of a test compound and identifying those compounds which alter the activity of the Tango-77 protein.

[0149] The invention also features methods for identifying a compound which modulates the expression of Tango-77 by measuring the expression of Tango-77 in the presence and absence of a compound.

### SPOIL

[0150] The present invention is based, at least in part, on the discovery of novel nucleic acid molecules which encode a novel family of proteins having homology to IL-1 receptor antagonist (IL-1ra) molecules, referred to herein as SPOIL nucleic acid and protein molecules. The SPOIL molecules of the present invention are useful as modulating agents in regulating a variety of cellular processes. Accordingly, in one aspect, this invention provides isolated nucleic acid molecules encoding SPOIL proteins and biologically active portions thereof, as well as nucleic acid fragments suitable as primers or hybridization probes for the detection of SPOIL-encoding nucleic acids. In one embodiment, an isolated nucleic acid molecule of the present invention preferably encodes a SPOIL protein which includes an interleukin-1 (IL-1) signature domain.

[0151] In another embodiment, an isolated nucleic acid molecule of the present invention preferably encodes a SPOIL protein which includes a SPOIL signature motif. In another embodiment, an isolated nucleic acid molecule of the present invention preferably encodes a SPOIL protein which includes a SPOIL unique domain. In another embodiment, an isolated nucleic acid molecule of the present invention preferably encodes a SPOIL protein which includes a SPOIL C-terminal unique domain. In another embodiment, an isolated nucleic acid molecule of the present invention preferably encodes a SPOIL protein which includes a signal sequence and/or is secreted. In yet another embodiment, an isolated nucleic acid molecule of the present invention preferably encodes a SPOIL protein which lacks a signal sequence and/or is intracellular. In another embodiment, the nucleic acid molecule is a naturally occurring nucleotide sequence.

[0152] In another embodiment, a nucleic acid molecule of the invention has 65% identity with the nucleotide sequence shown in SEQ ID NO:89, SEQ ID NO:101, SEQ ID NO:104, SEQ ID NO:112, the DNA insert of the plasmid deposited with ATCC as Accession Number 98883, the DNA insert of the plasmid deposited with ATCC as Accession Number 98984 or a complement thereof and, preferably, encodes a SPOIL protein. In yet another embodiment, the isolated nucleic acid molecule has 65% identity with the nucleotide sequence shown in SEQ ID NO:91, SEQ ID NO:103, SEQ ID NO:106, SEQ ID NO:114, or a complement thereof and, preferably, encodes a SPOIL protein. In a preferred embodiment, an isolated nucleic acid molecule encodes the amino acid sequence of a mammalian protein, (e.g., a human or mouse SPOIL protein.)

[0153] In another embodiment, the isolated nucleic acid molecule includes a nucleotide sequence encoding a protein having an amino acid sequence sufficiently homologous to the amino acid sequence of SEQ ID NO:90; SEQ ID NO:102, SEQ ID NO:105, SEQ ID NO:113, the amino acid sequence encoded by the DNA insert of the plasmid deposited with ATCC as Accession Number 98883, or the DNA insert of the plasmid deposited with ATCC as Accession Number 98984 and, preferably, encodes a SPOIL protein. In a preferred embodiment, the nucleic acid molecule has the nucleotide sequence shown in SEQ ID NO:91, SEQ ID NO:103, SEQ ID NO:106, or SEQ ID NO:114. In another preferred embodiment, the nucleic acid molecule has the nucleotide sequence shown in SEQ ID NO:89, SEQ ID NO:101, SEQ ID NO:104, SEQ ID NO:112, the DNA insert of the plasmid deposited with ATCC as Accession Number 98883, or the DNA insert of the plasmid deposited with ATCC as Accession Number 98984.

[0154] Another embodiment of the invention features isolated nucleic acid molecules which hybridize under stringent conditions to a nucleic acid molecule consisting of nucleotides 135-428 or nucleotides 495-746 of SEQ ID NO:89. In yet another preferred embodiment, the isolated nucleic acid molecules hybridize under stringent conditions to a nucleic acid molecule consisting of nucleotides 1-280, 123-260, or nucleotides 390-1291 of SEQ ID NO:101. In yet another preferred embodiment, the isolated nucleic acid molecules hybridize under stringent conditions to a nucleic acid molecule consisting of nucleotides 1-371, 98-721, or nucleotides 481-1377 of SEQ ID NO:104. In yet another preferred embodiment, the isolated nucleic acid molecules hybridize under stringent conditions to a nucleic acid molecule consisting of nucleotides 225-365, 96-575, or nucleotides 495-838 of SEQ ID NO:112. In another embodiment, the nucleic acid molecule is at least 300 nucleotides in length. In another embodiment, the nucleic acid molecule is at least 300 nucleotides in length and hybridizes under stringent conditions to a nucleic acid molecule comprising the nucleotide sequence shown in SEQ ID NO:89, SEQ ID NO:101, SEQ ID NO:104, SEQ ID NO:112, the DNA insert of the plasmid deposited with ATCC as Accession Number 98883, or the DNA insert of the plasmid deposited with ATCC as Accession Number 98984, or a complement thereof. In yet another embodiment, the nucleic acid molecule is at least 300 nucleotides in length and encodes a SPOIL protein or portion thereof, preferably a biologically active portion thereof.

[0155] In a preferred embodiment, an isolated nucleic acid molecule comprises nucleotides 135-428 of SEQ ID NO:89, or a complement thereof. In another embodiment, the nucleic acid molecule further comprises nucleotides 1-134 of SEQ ID NO:89. In yet another embodiment, the nucleic acid molecule further comprises nucleotides 429-746 of SEQ ID NO:89.

[0156] In another preferred embodiment, an isolated nucleic acid molecule comprises nucleotides 124-630 of SEQ ID NO:101, or a complement thereof. In another embodiment, the nucleic acid molecule further comprises nucleotides 1-123 of SEQ ID NO:101. In yet another embodiment, the nucleic acid molecule further comprises nucleotides 631-1291 of SEQ ID NO:101.

[0157] In another preferred embodiment, an isolated nucleic acid molecule comprises nucleotides 98-721 of SEQ ID NO:104, or a complement thereof. In another embodiment, the nucleic acid molecule further comprises nucleotides 1-97 of SEQ ID NO:104. In yet another embodiment, the nucleic acid molecule further comprises nucleotides 722-1377 of SEQ ID NO:104.

[0158] In another preferred embodiment, an isolated nucleic acid molecule comprises nucleotides 96-575 of SEQ ID NO:112, or a complement thereof. In another embodiment, the nucleic acid molecule further comprises nucleotides 1-95 of SEQ ID NO:112. In yet another embodiment, the nucleic acid molecule further comprises nucleotides 576-838 of SEQ ID NO:112.

[0159] Another embodiment the invention provides an isolated nucleic acid molecule which is antisense to the coding strand of a SPOIL nucleic acid.

[0160] Another aspect of the invention provides a vector comprising a nucleic acid molecule of the invention, preferably a SPOIL nucleic acid molecule. In certain embodiments, the vector is a recombinant expression vector. In another embodiment, the invention provides a host cell containing a vector of the invention. The invention also provides a method for producing SPOIL protein by culturing in a suitable medium, a host cell of the invention containing a recombinant expression vector such that SPOIL protein is produced.

[0161] Another aspect of this invention features isolated or recombinant proteins and polypeptides, preferably SPOIL proteins or polypeptides. In one embodiment, an isolated protein, preferably a SPOIL protein, has a SPOIL signature motif. In another embodiment, an isolated protein, preferably a SPOIL protein, has an IL-1 signature domain. In another embodiment, an isolated protein, preferably a SPOIL protein, has a SPOIL unique domain. In another embodiment, an isolated protein, preferably a SPOIL protein, has a SPOIL C-terminal unique domain. In another embodiment, an isolated protein, preferably a SPOIL protein, has a combination of two or more of the above-stated domains and/or motifs. In yet another embodiment, an isolated protein, preferably a SPOIL protein, has a signal sequence and/or is secreted. In yet another embodiment, an isolated protein, preferably a SPOIL protein, lacks a signal sequence and/or is intracellular. In another embodiment, an isolated protein, preferably a SPOIL protein, has an amino acid sequence sufficiently homologous to the amino acid sequence of SEQ ID NO:90, SEQ ID NO:102, SEQ ID NO:105, SEQ ID NO:113, the amino acid sequence encoded by the DNA insert of the plasmid deposited with ATCC as Accession Number 98883, or the amino acid sequence encoded by the DNA insert of the plasmid deposited with ATCC as Accession Number 98984. This invention further features isolated proteins, preferably SPOIL proteins, having an amino acid sequence at least about 45% identical to a SPOIL unique domain amino acid sequence. This invention further features isolated proteins, preferably SPOIL proteins, having an amino acid sequence at least about 45% identical to a SPOIL C-terminal unique domain amino acid sequence.

[0162] In another embodiment, the invention features fragments of the protein having the amino acid sequence of SEQ ID NO:90, SEQ ID NO:102, SEQ ID NO:105, SEQ ID NO:113, the amino acid sequence encoded by the DNA insert of the plasmid deposited with ATCC as Accession Number 98883, or the amino acid sequence encoded by the DNA insert of the plasmid deposited with ATCC as Accession Number 98984, wherein the fragment comprises at least 15 contiguous amino acids of the amino acid sequence of SEQ ID NO:90, SEQ ID NO:102, SEQ ID NO:105, SEQ ID NO:113, the amino acid sequence encoded by the DNA insert of the plasmid deposited with ATCC as Accession Number 98883, or the amino acid sequence encoded by the DNA insert of the plasmid deposited with ATCC as Accession Number 98984. In a preferred embodiment, the protein has the amino acid sequence of SEQ ID NO:90, SEQ ID NO:102, SEQ ID NO:105, or SEQ ID NO:113.

[0163] Another embodiment of the invention features an isolated protein, preferably a SPOIL protein, having an amino acid sequence at least about 60% identical to the amino acid sequence of SEQ ID NO:90, SEQ ID NO:102, SEQ ID NO:105, or SEQ ID NO:113, the amino acid sequence encoded by the DNA insert of the plasmid deposited with ATCC as Accession Number 98883, or the amino acid sequence encoded by the DNA insert of the plasmid deposited with ATCC as Accession Number 98984. Another embodiment of the invention features an isolated protein, preferably a SPOIL protein, having an amino acid sequence at least about 85% identical to the amino acid sequence of SEQ ID NO:102 or the amino acid sequence encoded by the DNA insert of the plasmid deposited with ATCC as Accession Number 98984. Yet another embodiment of the invention features isolated proteins, preferably SPOIL proteins, which are encoded by nucleic acid molecules having a nucleotide sequence at least about 60% identical to a nucleotide sequence of SEQ ID NO:89, SEQ ID NO:91, SEQ ID NO:101, SEQ ID NO:103; SEQ ID NO:104, SEQ ID NO:106, SEQ ID NO:112, SEQ ID NO:114, the DNA insert of the plasmid deposited with ATCC as Accession Number 98883, or the DNA insert of the plasmid deposited with ATCC as Accession Number 98984, or a complement thereof.

[0164] This invention further features isolated proteins, preferably SPOIL proteins, which are encoded by nucleic acid molecules having a nucleotide sequence which hybridizes under stringent hybridization conditions to the complement of a nucleic acid molecule comprising the nucleotide sequence of SEQ ID NO:89, SEQ ID NO:91, SEQ ID NO:101, SEQ ID NO:103; SEQ ID NO:104, SEQ ID NO:106, SEQ ID NO:112, or SEQ ID NO:114.

[0165] The proteins of the present invention, preferably SPOIL proteins, or portions thereof (e.g., biologically active portions thereof), can be operatively linked to a non-SPOIL polypeptide to form fusion proteins, preferably SPOIL fusion proteins. The invention further features antibodies that specifically bind SPOIL proteins, such as monoclonal or polyclonal antibodies. In addition, the proteins of the invention or biologically active portions thereof can be incorporated into pharmaceutical compositions, which optionally include pharmaceutically acceptable carriers.

[0166] In another aspect, the present invention provides a method for detecting the presence of SPOIL activity or expression in a biological sample by contacting the biological sample with an agent capable of detecting an indicator of SPOIL activity such that the presence of SPOIL activity is detected in the biological sample.

[0167] In another aspect, the invention provides a method for modulating SPOIL activity comprising contacting a cell capable of expressing SPOIL with an agent that modulates SPOIL activity such that SPOIL activity in the cell is modulated. In one embodiment, the agent inhibits SPOIL activity. In another embodiment, the agent stimulates SPOIL activity. In one embodiment, the agent is an antibody that specifically binds to SPOIL protein. In another embodiment, the agent modulates expression of SPOIL by modulating transcription of a SPOIL gene or translation of a SPOIL mRNA. In yet another embodiment, the agent is a nucleic acid molecule having a nucleotide sequence that is antisense to the coding strand of the SPOIL mRNA or the SPOIL gene.

[0168] In another aspect, the invention provides a method for modulating IL-1 activity comprising contacting a cell capable of expressing and/or responding to IL-1 with an agent that modulates SPOIL activity such that IL-1 activity in the cell is modulated. In one embodiment, an agent inhibits or reduces IL-1 activity. Thus, in one embodiment, the SPOIL agent is a protein of the invention, preferably a SPOIL protein or a biologically active portion thereof which functions as an IL-1 receptor antagonist. In another embodiment, a SPOIL agent stimulates IL-1 activity. Thus, in another embodiment, the SPOIL agent is a protein of the invention, preferably a SPOIL protein, SPOIL variant, or biologically active portion thereof which functions as an IL-1 receptor agonist.

[0169] In another embodiment, the SPOIL agent is a protein of the invention, preferably a SPOIL protein or a biologically active portion thereof, which modulates an anti-inflammatory cytokine (e.g., soluble TNF-Receptor p55 (sTNFRp55), sTNFRp75 and IL-1 receptor antagonist (IL-1Ra)). In yet another embodiment, the SPOIL agent is a protein of the invention, preferably a SPOIL protein, SPOIL variant, or biologically active portion thereof, which modulates a pro-inflammatory cytokine (e.g., tumor necrosis factor (TNF-α), interleukin-6 (IL-6) and interleukin-1b (IL-1b)).

[0170] In one embodiment, the methods of the present invention are used to treat a subject having a disorder characterized by aberrant SPOIL and/or IL-1 expression by administering an agent which is a SPOIL modulator to the subject. In one embodiment, the SPOIL agent is a SPOIL protein or SPOIL variant. In yet another embodiment, the SPOIL agent is a peptide, peptidomimetic, or other small molecule. In a preferred embodiment, the disorder characterized by aberrant SPOIL and/or IL-1 expression is a bone metabolism disorder, a proinflammatory disorder, or an immune disorder.

[0171] The present invention also provides a diagnostic assay for identifying the presence or absence of a genetic alteration characterized by at least one of (i) aberrant modification or mutation of a gene encoding a SPOIL protein; (ii) mis-regulation of said gene; and (iii) aberrant post-translational modification of a SPOIL protein, wherein a wild-type form of said gene encodes an protein with a SPOIL activity.

[0172] In another aspect, the invention provides a method for identifying a compound that binds to or modulates the activity of a SPOIL protein, by providing an indicator composition comprising an a SPOIL protein having SPOIL activity, contacting the indicator composition with a test compound, and determining the effect of the test compound on SPOIL activity in the indicator composition to identify a compound that modulates the activity of a SPOIL protein.

### NEOKINE

[0173] The present invention is based, at least in part, on the discovery of nucleic acid molecules which encode a novel family of secreted proteins, referred to herein as the Neokine family of proteins (“NEOKINES” or “NEOKINE proteins”) which are ligands for a previously-identified putative G protein-coupled receptor termed “RDC1” also referred to herein as the “NEOKINE receptor”. The NEOKINE molecules of the present invention are useful as modulating agents in regulating a variety of cellular processes. Accordingly, in one aspect, this invention provides isolated nucleic acid molecules encoding NEOKINE proteins or biologically active portions thereof, as well as nucleic acid fragments suitable as primers or hybridization probes for the detection of NEOKINE-encoding nucleic acids.

[0174] In one embodiment, a NEOKINE nucleic acid molecule is 60% homologous to the nucleotide sequence shown in SEQ ID NO:115, SEQ ID NO:117, the nucleotide sequence of the DNA insert of the plasmid deposited with ATCC as Accession Number 98751, or complement thereof. In another embodiment, a NEOKINE nucleic acid molecule is 60% homologous to the nucleotide sequence shown in SEQ ID NO:118, SEQ ID NO:120, or a complement thereof. In yet another embodiment, a NEOKINE nucleic acid molecule is 60% homologous to the nucleotide sequence shown in SEQ ID NO:121 or SEQ ID NO:123. In yet another embodiment, a NEOKINE nucleic acid molecule is 60% homologous to the nucleotide sequence shown in SEQ ID NO:124. In a preferred embodiment, an isolated NEOKINE nucleic acid molecule has the nucleotide sequence shown SEQ ID NO:117, or a complement thereof. In another embodiment, a NEOKINE nucleic acid molecule further comprises nucleotides 1-96 of SEQ ID NO:115. In another embodiment, a NEOKINE nucleic acid molecule further comprises nucleotides 394-1564 of SEQ ID NO:115. In another preferred embodiment, an isolated NEOKINE nucleic acid molecule has the nucleotide sequence shown in SEQ ID NO:115.

[0175] In another preferred embodiment, an isolated NEOKINE nucleic acid molecule has the nucleotide sequence shown SEQ ID NO:120, or a complement thereof. In another embodiment, a NEOKINE nucleic acid molecule further comprises nucleotides 1-211 of SEQ ID NO:118. In another embodiment, a NEOKINE nucleic acid molecule further comprises nucleotides 509-1656 of SEQ ID NO:118. In another preferred embodiment, an isolated NEOKINE nucleic acid molecule has the nucleotide sequence shown in SEQ ID NO:118.

[0176] In another preferred embodiment, an isolated NEOKINE nucleic acid molecule has the nucleotide sequence shown SEQ ID NO:123, or a complement thereof. In another embodiment, a NEOKINE nucleic acid molecule further comprises nucleotides 235-1372 of SEQ ID NO:121. In another preferred embodiment, an isolated NEOKINE nucleic acid molecule has the nucleotide sequence shown in SEQ ID NO:121.

[0177] In another preferred embodiment, an isolated NEOKINE nucleic acid molecule has the nucleotide sequence shown SEQ ID NO:136, or a complement thereof. In another embodiment, a NEOKINE nucleic acid molecule further comprises nucleotides 285-1458 of SEQ ID NO:124. In another preferred embodiment, an isolated NEOKINE nucleic acid molecule has the nucleotide sequence shown in SEQ ID NO:124.

[0178] In another preferred embodiment, an isolated NEOKINE nucleic acid molecule is of human origin and has the nucleotide sequence of the DNA insert of the plasmid deposited with ATCC as Accession Number 98751, or a complement thereof. In another embodiment, an isolated NEOKINE nucleic acid molecule is of rat origin. In another embodiment, an isolated NEOKINE nucleic acid molecule is of macaque origin.

[0179] In another embodiment, a NEOKINE nucleic acid molecule includes a nucleotide sequence encoding a protein having an amino acid sequence sufficiently homologous to the amino acid sequence of SEQ ID NO:116, SEQ ID NO:119, SEQ ID NO:122, or SEQ ID NO:125. In another preferred embodiment, a NEOKINE nucleic acid molecule includes a nucleotide sequence encoding a protein having an amino acid sequence at least 60% homologous to the amino acid sequence of SEQ ID NO:116. In yet another preferred embodiment, a NEOKINE nucleic acid molecule includes a nucleotide sequence encoding a protein having an amino acid sequence at least 60% homologous to the amino acid sequence of SEQ ID NO:119. In yet another preferred embodiment, a NEOKINE nucleic acid molecule includes a nucleotide sequence encoding a protein having an amino acid sequence at least 60% homologous to the amino acid sequence of SEQ ID NO:122. In yet another preferred embodiment, a NEOKINE nucleic acid molecule includes a nucleotide sequence encoding a protein having an amino acid sequence at least 60% homologous to the amino acid sequence of SEQ ID NO:125.

[0180] In another embodiment, an isolated nucleic acid molecule of the present invention encodes a NEOKINE protein which includes a NEOKINE CXC signature motif. In another embodiment, an isolated nucleic acid molecule of the present invention encodes a NEOKINE protein which includes a NEOKINE CXC signature motif and a signal sequence and is secreted. In yet another embodiment, a NEOKINE nucleic acid molecule encodes a NEOKINE protein and is a naturally occurring nucleotide sequence.

[0181] Another embodiment of the invention features NEOKINE nucleic acid molecules which specifically detect NEOKINE nucleic acid molecules relative to nucleic acid molecules encoding non-NEOKINE proteins. For example, in one embodiment, a NEOKINE nucleic acid molecule is at least 650 nucleotides in length and hybridizes under stringent conditions to a nucleic acid molecule comprising the nucleotide sequence shown in SEQ ID NO:115, SEQ ID NO:118, SEQ ID NO:121, or SEQ ID NO:124, or a complement thereof.

[0182] Another embodiment of the invention provides an isolated nucleic acid molecule which is antisense to the coding strand of a NEOKINE nucleic acid.

[0183] Another aspect of the invention provides a vector comprising a NEOKINE nucleic acid molecule. In certain embodiments, the vector is a recombinant expression vector. In another embodiment, the invention provides a host cell containing a vector of the invention. The invention also provides a method for producing a NEOKINE protein by culturing in a suitable medium, a host cell of the invention containing a recombinant expression vector such that a NEOKINE protein is produced.

[0184] Another aspect of this invention features isolated or recombinant NEOKINE proteins and polypeptides. In one embodiment, an isolated NEOKINE protein includes a NEOKINE CXC signature motif and is secreted. In another embodiment, an isolated NEOKINE protein includes a NEOKINE CXC signature motif and a signal sequence, and is secreted. In another embodiment, an isolated NEOKINE protein has an amino acid sequence sufficiently homologous to the amino acid sequence of SEQ ID NO:116, SEQ ID NO:119, SEQ ID NO:122, or SEQ ID NO:125. In a preferred embodiment, a NEOKINE protein has an amino acid sequence at least about 60% homologous to the amino acid sequence of SEQ ID NO:116. In another preferred embodiment, a NEOKINE protein has an amino acid sequence at least about 60% homologous to the amino acid sequence of SEQ ID NO:119. In another preferred embodiment, a NEOKINE protein has an amino acid sequence at least about 60% homologous to the amino acid sequence of SEQ ID NO:122. In another preferred embodiment, a NEOKINE protein has an amino acid sequence at least about 60% homologous to the amino acid sequence of SEQ ID NO:125. In another embodiment, a NEOKINE protein has the amino acid sequence of SEQ ID NO:116, SEQ ID NO:119, SEQ ID NO:122, or SEQ ID NO:125.

[0185] Another embodiment of the invention features an isolated NEOKINE protein which is encoded by a nucleic acid molecule having a nucleotide sequence at least about 60% homologous to a nucleotide sequence of SEQ ID NO:115, or a complement thereof. Another embodiment of the invention features an isolated NEOKINE protein which is encoded by a nucleic acid molecule having a nucleotide sequence at least about 60% homologous to a nucleotide sequence of SEQ ID NO:118, or a complement thereof. Another embodiment of the invention features an isolated NEOKINE protein which is encoded by a nucleic acid molecule having a nucleotide sequence at least about 60% homologous to a nucleotide sequence of SEQ ID NO:121, or a complement thereof. Another embodiment of the invention features an isolated NEOKINE protein which is encoded by a nucleic acid molecule having a nucleotide sequence at least about 60% homologous to a nucleotide sequence of SEQ ID NO:124, or a complement thereof. This invention further features an isolated NEOKINE protein which is encoded by a nucleic acid molecule having a nucleotide sequence which hybridizes under stringent hybridization conditions to a nucleic acid molecule comprising the nucleotide sequence of SEQ ID NO:115, SEQ ID NO:118, SEQ ID NO:121, SEQ ID NO:124, or a complement thereof.

[0186] The NEOKINE proteins of the present invention, or biologically active portions thereof, can be operatively linked to a non-NEOKINE polypeptide to form NEOKINE fusion proteins. The invention further features antibodies that specifically bind NEOKINE proteins, such as monoclonal or polyclonal antibodies. In addition, the NEOKINE proteins or biologically active portions thereof can be incorporated into pharmaceutical compositions, which optionally include pharmaceutically acceptable carriers.

[0187] In another aspect, the present invention provides a method for detecting NEOKINE expression in a biological sample by contacting the biological sample with an agent capable of detecting a NEOKINE nucleic acid molecule, protein or polypeptide such that the presence of a NEOKINE nucleic acid molecule, protein or polypeptide is detected in the biological sample.

[0188] In another aspect, the present invention provides a method for detecting the presence of NEOKINE activity in a biological sample by contacting the biological sample with an agent capable of detecting an indicator of NEOKINE activity such that the presence of NEOKINE activity is detected in the biological sample.

[0189] In another aspect, the invention provides a method for modulating NEOKINE activity comprising contacting the cell with an agent that modulates NEOKINE activity such that NEOKINE activity in the cell is modulated. In one embodiment, the agent inhibits NEOKINE activity. In another embodiment, the agent stimulates NEOKINE activity. In one embodiment, the agent is an antibody that specifically binds to a NEOKINE protein. In another embodiment, the agent modulates expression of NEOKINE by modulating transcription of a NEOKINE gene or translation of a NEOKINE mRNA. In yet another embodiment, the agent is a nucleic acid molecule having a nucleotide sequence that is antisense to the coding strand of a NEOKINE mRNA or a NEOKINE gene.

[0190] In one embodiment, the methods of the present invention are used to treat a subject having a disorder characterized by aberrant NEOKINE protein or nucleic acid expression or activity by administering an agent which is a NEOKINE modulator to the subject. In one embodiment, the NEOKINE modulator is a NEOKINE protein. In another embodiment the NEOKINE modulator is a NEOKINE nucleic acid molecule. In yet another embodiment, the NEOKINE modulator is a peptide, peptidomimetic, or other small molecule. In a preferred embodiment, the disorder characterized by aberrant NEOKINE protein or nucleic acid expression is a developmental, differentiative, proliferative disorder, an immunological disorder, or cell death.

[0191] The present invention also provides a diagnostic assay for identifying the presence or absence of a genetic alteration characterized by at least one of (i) aberrant modification or mutation of a gene encoding a NEOKINE protein; (ii) mis-regulation of said gene; and (iii) aberrant post-translational modification of a NEOKINE protein, wherein a wild-type form of said gene encodes an protein with a NEOKINE activity.

[0192] The present invention also provides methods for identifying compounds which modulate binding of NEOKINE to the NEOKINE receptor and methods for identifying compounds which modulate the activity of the NEOKINE receptor (e.g., cell-based as well as in vitro screening assays).

### TANGO 129

[0193] The present invention is based, at least in part, on the discovery of a gene encoding T129, a transmembrane protein that is predicted to be a member of the TNF receptor superfamily. The T129 cDNA described below (SEQ ID NO:137) has a 1290 nucleotide open reading frame (nucleotides 99-1388 of SEQ ID NO:137; SEQ ID NO:139) which encodes a 430 amino acid protein (SEQ ID NO:138). This protein includes a predicted signal sequence of about 22 amino acids (from amino acid 1 to about amino acid 22 of SEQ ID NO:138) and a predicted mature protein of about 408 amino acids (from about amino acid 23 to amino acid 430 of SEQ ID NO:138; SEQ ID NO:140). T129 protein possesses a Tumor Necrosis Factor Receptor/Nerve Growth Factor Receptor (“TNFR/NGFR”) cysteine-rich region domain (amino acids 51-90; SEQ ID NO:142). T129 is predicted to have one transmembrane domain (TM) which extends from about amino acid 163 (extracellular end) to about amino acid 186 (cytoplasmic end) of SEQ ID NO:138.

[0194] The T129 molecules of the present invention are useful as modulating agents in regulating a variety of cellular processes. Accordingly, in one aspect, this invention provides isolated nucleic acid molecules encoding T129 proteins or biologically active portions thereof, as well as nucleic acid fragments suitable as primers or hybridization probes for the detection of T129-encoding nucleic acids.

[0195] The invention features a nucleic acid molecule which is at least 45% (or 55%, 65%, 75%, 85%, 95%, or 98%) identical to the nucleotide sequence shown in SEQ ID NO:137, or SEQ ID NO:139, or a complement thereof. The invention features a nucleic acid molecule which includes a fragment of at least 300 (325, 350, 375, 400, 425, 450, 500, 550, 600, 650, 700, 800, 900, 1000, or 1290) nucleotides of the nucleotide sequence shown in SEQ ID NO:137, or SEQ ID NO:139, or a complement thereof.

[0196] The invention also features a nucleic acid molecule which includes a nucleotide sequence encoding a protein having an amino acid sequence that is at least 45% (or 55%, 65%, 75%, 85%, 95%, or 98%) identical to the amino acid sequence of SEQ ID NO:138, SEQ ID NO:140. In a preferred embodiment, a T129 nucleic acid molecule has the nucleotide sequence shown SEQ ID NO:137, or SEQ ID NO:139.

[0197] Also within the invention is a nucleic acid molecule which encodes a fragment of a polypeptide having the amino acid sequence of SEQ ID NO:138 or SEQ ID NO:140, the fragment including at least 15 (25, 30, 50, 100, 150, 300, or 400) contiguous amino acids of SEQ ID NO:138 or SEQ ID NO:140.

[0198] The invention includes a nucleic acid molecule which encodes a naturally occurring allelic variant of a polypeptide comprising the amino acid sequence of SEQ ID NO:138 or SEQ ID NO:140, wherein the nucleic acid molecule hybridizes to a nucleic acid molecule comprising SEQ ID NO:137 or SEQ ID NO:139 under stringent conditions.

[0199] Also within the invention are: an isolated T129 protein having an amino acid sequence that is at least about 65%, preferably 75%, 85%, 95%, or 98% identical to the amino acid sequence of SEQ ID NO:140 (mature human T129) or the amino acid sequence of SEQ ID NO:138 (immature human T129); and an isolated T129 protein having an amino acid sequence that is at least about 85%, 95%, or 98% identical to the TNFR/NGFR cysteine-rich domain of SEQ ID NO:138 (e.g., about amino acid residues 51 to 90 of SEQ ID NO:138; SEQ ID NO:142).

[0200] Also within the invention are: an isolated T129 protein which is encoded by a nucleic acid molecule having a nucleotide sequence that is at least about 65%, preferably 75%, 85%, or 95% identical to SEQ ID NO:139; an isolated T129 protein which is encoded by a nucleic acid molecule having a nucleotide sequence at least about 65% preferably 75%, 85%, or 95% identical the TNFR/NGFR cysteine-rich domain encoding portion of SEQ ID NO:137 (e.g., about nucleotides 248 to 368 of SEQ ID NO:137); and an isolated T129 protein which is encoded by a nucleic acid molecule having a nucleotide sequence which hybridizes under stringent hybridization conditions to a nucleic acid molecule having the nucleotide sequence of SEQ ID NO:139.

[0201] Also within the invention is a polypeptide which is a naturally occurring allelic variant of a polypeptide that includes the amino acid sequence of SEQ ID NO:138 or SEQ ID NO:140, wherein the polypeptide is encoded by a nucleic acid molecule which hybridizes to a nucleic acid molecule comprising SEQ ID NO:137 or SEQ ID NO:139 under stringent conditions.

[0202] Another embodiment of the invention features T129 nucleic acid molecules which specifically detect T129 nucleic acid molecules relative to nucleic acid molecules encoding other members of the TNF receptor superfamily. For example, in one embodiment, a T129 nucleic acid molecule hybridizes under stringent conditions to a nucleic acid molecule comprising the nucleotide sequence of SEQ ID NO:137, SEQ ID NO:139, or a complement thereof. In another embodiment, the T129 nucleic acid molecule is at least 300 (325, 350, 375, 400, 425, 450, 500, 550, 600, 650, 700, 800, 900, 1000, or 1290) nucleotides in length and hybridizes under stringent conditions to a nucleic acid molecule comprising the nucleotide sequence shown in SEQ ID NO:137, SEQ ID NO:139, or a complement thereof. In a preferred embodiment, an isolated T129 nucleic acid molecule comprises nucleotides 248 to 368 of SEQ ID NO:137, encoding the TNFR/NGFR cysteine-rich domain of T129, or a complement thereof. In another embodiment, the invention provides an isolated nucleic acid molecule which is antisense to the coding strand of a T129 nucleic acid.

[0203] Another aspect of the invention provides a vector, e.g., a recombinant expression vector, comprising a T129 nucleic acid molecule of the invention. In another embodiment the invention provides a host cell containing such a vector. The invention also provides a method for producing T129 protein by culturing, in a suitable medium, a host cell of the invention containing a recombinant expression vector such that a T129 protein is produced.

[0204] Another aspect of this invention features isolated or recombinant T129 proteins and polypeptides. Preferred T129 proteins and polypeptides possess at least one biological activity possessed by naturally occurring human T129, e.g., (1) the ability to form protein:protein interactions with proteins in the T129 signalling pathway; (2) the ability to bind T129 ligand; (3) the ability to bind to an intracellular target. Other activities include: (1) modulation of cellular proliferation and (2) modulation of cellular differentiation. In one embodiment, an isolated T129 protein has a TNFR/NGFR cysteine-rich domain and lacks both a transmembrane and a cytoplasmic domain. In another embodiment the T129 polypeptide lacks both a transmembrane domain and a cytoplasmic domain and is soluble under physiological conditions.

[0205] The T129 proteins of the present invention, or biologically active portions thereof, can be operatively linked to a non-T129 polypeptide (e.g., heterologous amino acid sequences) to form T129 fusion proteins. The invention further features antibodies that specifically bind T129 proteins, such as monoclonal or polyclonal antibodies. In addition, the T129 proteins or biologically active portions thereof can be incorporated into pharmaceutical compositions, which optionally include pharmaceutically acceptable carriers.

[0206] In another aspect, the present invention provides a method for detecting the presence of T129 activity or expression in a biological sample by contacting the biological sample with an agent capable of detecting an indicator of T129 activity such that the presence of T129 activity is detected in the biological sample.

[0207] In another aspect, the invention provides a method for modulating T129 activity comprising contacting a cell with an agent that modulates (inhibits or stimulates) T129 activity or expression such that T129 activity or expression in the cell is modulated. In one embodiment, the agent is an antibody that specifically binds to T129 protein. In another embodiment, the agent modulates expression of T129 by modulating transcription of a T129 gene, splicing of a T129 mRNA, or translation of a T129 mRNA. In yet another embodiment, the agent is a nucleic acid molecule having a nucleotide sequence that is antisense to the coding strand of the T129 mRNA or the T129 gene.

[0208] In one embodiment, the methods of the present invention are used to treat a subject having a disorder characterized by aberrant T129 protein or nucleic acid expression or activity by administering an agent which is a T129 modulator to the subject. In one embodiment, the T129 modulator is a T129 protein. In another embodiment the T129 modulator is a T129 nucleic acid molecule. In other embodiments, the T129 modulator is a peptide, peptidomimetic, or other small molecule. In a preferred embodiment, the disorder characterized by aberrant T129 protein or nucleic acid expression is a proliferative or differentiative disorder, particularly of the immune system. The present invention also provides a diagnostic assay for identifying the presence or absence of a genetic lesion or mutation characterized by at least one of: (i) aberrant modification or mutation of a gene encoding a T129 protein; (ii) mis-regulation of a gene encoding a T129 protein; and (iii) aberrant post-translational modification of a T129 protein, wherein a wild-type form of the gene encodes a protein with a T129 activity.

[0209] In another aspect, the invention provides a method for identifying a compound that binds to or modulates the activity of a T129 protein. In general, such methods entail measuring a biological activity of a T129 protein in the presence and absence of a test compound and identifying those compounds which alter the activity of the T129 protein.

[0210] The invention also features methods for identifying a compound which modulates the expression of T129 by measuring the expression of T129 in the presence and absence of a compound.

### A259 (Integrin Alpha Subunit)

[0211] This invention provides novel human and murine nucleic acid molecules which encode proteins referred to herein as A259 proteins, which are novel integrin α subunits. These proteins, fragments, derivatives, and variants thereof are collectively referred to herein as “polypeptides of the invention” or “proteins of the invention”. Nucleic acid molecules encoding the polypeptides or proteins of the invention are collectively referred to as “nucleic acids of the invention”.

[0212] The A259 proteins are homologous to the α subunits of the integrin family, and in particular, to the α10 and α1 subunits of the integrin family.

[0213] The nucleic acids and polypeptides of the present invention are useful as modulating agents in regulating a variety of cellular processes. Accordingly, in one aspect, this invention provides isolated nucleic acid molecules encoding a polypeptide of the invention or a biologically active portion thereof. The present invention also provides nucleic acid molecules which are suitable for use as primers or hybridization probes for the detection of nucleic acids encoding a polypeptide of the invention.

[0214] The invention features nucleic acid molecules which are at least 47% (or 50%, 55%, 60%, 65%, 70%, 75%, 80%, 85%, 90%, 95%, or 98%) identical to the nucleotide sequence of SEQ ID NO:145, SEQ ID NO:163, the nucleotide sequence of the cDNA insert of a clone deposited with ATCC as Accession Number 207190 or 207191, or a complement thereof.

[0215] The invention features nucleic acid molecules which are at least 56% (or 57%, 58%, 59%, 60%, 65%, 70%, 75%, 80%, 85%, 90%, 95%, or 98%) identical to the nucleotide sequence of SEQ ID NO:146, SEQ ID NO:164, the nucleotide sequence of the cDNA insert of a clone deposited with ATCC as Accession Number 207190 or 207191, or a complement thereof.

[0216] The invention features nucleic acid molecules which include a fragment of at least 390 (400, 500, 600, 800, 1000, 1250, 1500, 1750, 2000, 2250, 2500, 2750, 3000, 3250, 3500, 3750, 4000, 4250, 4500, 4750, 5000, 5025, or 5042) nucleotides of the nucleotide sequence of SEQ ID NO:145, SEQ ID NO:163, the nucleotide sequence of the cDNA of ATCC Accession Number 207190 or 207191, or a complement thereof.

[0217] The invention also features nucleic acid molecules which include a nucleotide sequence encoding a protein having an amino acid sequence that is at least 44% (or 45%, 50%, 55%, 60%, 65%, 75%, 85%, 95%, or 98%) identical to the amino acid sequence of SEQ ID NO:147, SEQ ID NO:165, the amino acid sequence encoded by the cDNA of ATCC Accession Number 207190 or 207191, or a complement thereof.

[0218] In preferred embodiments, the nucleic acid molecules have the nucleotide sequence of SEQ ID NO:145, 146, 163, 164, or the nucleotide sequence of the cDNA of ATCC Accession Number 207190 or 207191.

[0219] Also within the invention are nucleic acid molecules which encode a fragment of a polypeptide having the amino acid sequence of SEQ ID NO:147, SEQ ID NO:165, or a fragment including at least 15 (25, 30, 50, 75, 100, 150, 200, 250, 300, 350, 400, 450, 500, 550, 600, 650, 700, 750, 800, 850, 900, 950, 1000, 1050, 1100, 1150, 1170, 1180, or 1188) contiguous amino acids of SEQ ID NO:147, SEQ ID NO:165, or the amino acid sequence encoded by the cDNA of ATCC Accession Number 207190 or 207191.

[0220] The invention includes nucleic acid molecules which encode a naturally occurring allelic variant of a polypeptide comprising the amino acid sequence of SEQ ID NO:147, SEQ ID NO:165, or the amino acid sequence encoded by the cDNA of ATCC Accession Number 207190 or 207191, wherein the nucleic acid molecule hybridizes to a nucleic acid molecule consisting of a nucleic acid sequence encoding SEQ ID NO:147, SEQ ID NO:165, the amino acid sequence encoded by the cDNA of ATCC Accession Number 207190 or 207191, or a complement thereof under stringent conditions.

[0221] Also within the invention are isolated polypeptides or proteins having an amino acid sequence that is at least about 44%, preferably 45%, 50%, 55%, 60%, 65%, 75%, 85%, 95%, or 98% identical to the amino acid sequence of SEQ ID NO:147, SEQ ID NO:165, or the amino acid sequence encoded by the cDNA of ATCC Accession Number 207190 or 207191.

[0222] Also within the invention are isolated polypeptides or proteins which are encoded by a nucleic acid molecule having a nucleotide sequence that is at least about 56%, preferably 57%, 58%, 59%, 60%, 65%, 70%, 75%, 80%, 85%, 90%, 95%, or 98% identical to the nucleic acid sequence encoding SEQ ID NO:147, SEQ ID NO:165, and isolated polypeptides or proteins which are encoded by a nucleic acid molecule having a nucleotide sequence which hybridizes under stringent hybridization conditions to a nucleic acid molecule having the nucleotide sequence of SEQ ID NO:145, 146, 163, or 164, a complement thereof, or the non-coding strand of the cDNA of ATCC Accession Number 207190 or 207191.

[0223] Also within the invention are polypeptides which are naturally occurring allelic variants of a polypeptide that includes the amino acid sequence of SEQ ID NO:147, or the amino acid sequence encoded by the cDNA of ATCC Accession Number 207190 or 207191, wherein the polypeptide is encoded by a nucleic acid molecule which hybridizes to a nucleic acid molecule having the sequence of SEQ ID NO:145, 146, 163, 164, or a complement thereof under stringent conditions.

[0224] The invention also features nucleic acid molecules that hybridize under stringent conditions to a nucleic acid molecule having the nucleotide sequence of SEQ ID NO:145, 146, 163, or 164, the cDNA of ATCC Accession Number 207190 or 207191, or a complement thereof. In other embodiments, the nucleic acid molecules are at least 390 (400, 500, 600, 800, 1000, 1250, 1500, 1750, 2000, 2250, 2500, 2750, 3000, 3250, 3500, 3750, 4000, 4250, 4500, 4750, 5000, 5025, or 5042) nucleotides in length and hybridize under stringent conditions to a nucleic acid molecule comprising the nucleotide sequence of SEQ ID NO:145, 146, 163, or 164, the cDNA of ATCC Accession Number 207190 or 207191, or a complement thereof.

[0225] In one embodiment, the invention provides an isolated nucleic acid molecule which is antisense to the coding strand of a nucleic acid of the invention.

[0226] Another aspect of the invention provides vectors, e.g., recombinant expression vectors, comprising a nucleic acid molecule of the invention. In another embodiment, the invention provides host cells containing such a vector or a nucleic acid molecule of the invention. The invention also provides methods for producing a polypeptide of the invention by culturing, in a suitable medium, a host cell of the invention containing a recombinant expression vector such that a polypeptide is produced.

[0227] Another aspect of this invention features isolated or recombinant proteins and polypeptides of the invention. Preferred proteins and polypeptides possess at least one biological activity possessed by the corresponding naturally-occurring human polypeptide. An activity, a biological activity, or a functional activity of a polypeptide or nucleic acid of the invention refers to an activity exerted by a protein, polypeptide or nucleic acid molecule of the invention on a responsive cell as determined in vivo, or in vitro, according to standard techniques. Such activities can be a direct activity, such as an association with or an enzymatic activity on a second protein, or an indirect activity, such as a cellular signaling activity mediated by interaction of the protein with a second protein.

[0228] A259 biological activities include, e.g., (1) the ability to form protein-protein interactions with proteins in the signaling pathway of the naturally-occurring polypeptide; (2) the ability to bind a ligand of the naturally-occurring polypeptide; (3) the ability to interact with an A259 ligand; and (4) the ability to modulate function, survival, morphology, migration, proliferation and/or differentiation of cells, e.g., of tissues in which it is expressed (e.g., osteoblasts, bone marrow, neural tissue).

[0229] A259 biological activities also include, e.g., (1) the ability to modulate, e.g., stabilize, protein-protein interactions (e.g., homophilic and/or heterophilic), and protein-ligand interactions, e.g., in receptor-ligand recognition; (2) ability to modulate signalling pathways; (3) ability to modulate cell-cell interactions, e.g., by acting as a cell-cell adhesion molecule, or by acting as a receptor for cell-cell adhesion molecules; (4) the ability to modulate interactions between cells and proteins (e.g., extracellular matrix proteins, e.g., collagens, fibrinogens, laminins, and fibronectin), e.g., by acting as a cell surface receptor; (5) the ability to interact, e.g., noncovalently interact, with an integrin β subunit; and (6) the ability to exhibit an activity of an integrin α10 or an integrin α1 subunit.

[0230] Still other A259 biological activities include, e.g., (1) the ability to modulate, e.g., initiate, an immune response, e.g., an inflammatory response; (2) the ability to modulate, e.g., initiate wound healing, e.g., by modulating platelet aggregation or by modulating fibroblast attachment to wound sites during wound contraction; and (3) the ability to stimulate fibrogenesis.

[0231] In one embodiment, a polypeptide of the invention has an amino acid sequence sufficiently identical to an identified domain of a polypeptide of the invention. As used herein, the term “sufficiently identical” refers to a first amino acid or nucleotide sequence which contains a sufficient or minimum number of identical or equivalent (e.g., with a similar side chain) amino acid residues or nucleotides to a second amino acid or nucleotide sequence such that the first and second amino acid or nucleotide sequences have a common structural domain and/or common functional activity. For example, amino acid or nucleotide sequences which contain a common structural domain having about 60% identity, preferably 65% identity, more preferably 75%, 85%, 95%, 98% or more identity are defined herein as sufficiently identical.

[0232] In one embodiment, an A259 protein includes at least one or more of the following domains: a signal sequence, an extracellular domain, a repeat domain, an I domain, an intergrin alpha repeat domain, a transmembrane domain, and a cytoplasmic domain. In yet another embodiment, an A259 protein includes an extracellular domain and one or more repeat domains, and or one or more integrin alpha repeat domains, and is a soluble protein. In still another embodiment, an A259 protein includes an extracellular domain, one or more repeat domains, a transmembrane domain, a cytoplasmic domain, and is a receptor protein.

[0233] The polypeptides of the present invention, or biologically active portions thereof, can be operably linked to a heterologous amino acid sequence to form fusion proteins. The invention further features antibodies that specifically bind a polypeptide of the invention such as monoclonal or polyclonal antibodies. In addition, the polypeptides of the invention or biologically active portions thereof can be incorporated into pharmaceutical compositions, which optionally include pharmaceutically acceptable carriers.

[0234] In another aspect, the present invention provides methods for detecting the presence of the activity or expression of a polypeptide of the invention in a biological sample by contacting the biological sample with an agent capable of detecting an indicator of activity such that the presence of activity is detected in the biological sample.

[0235] In another aspect, the invention provides methods for modulating activity of a polypeptide of the invention comprising contacting a cell with an agent that modulates (inhibits or stimulates) the activity or expression of a polypeptide of the invention such that activity or expression in the cell is modulated. In one embodiment, the agent is an antibody that specifically binds to a polypeptide of the invention.

[0236] In another embodiment, the agent modulates expression of a polypeptide of the invention by modulating transcription, splicing, or translation of an mRNA encoding a polypeptide of the invention. In yet another embodiment, the agent is a nucleic acid molecule having a nucleotide sequence that is antisense to the coding strand of an mRNA encoding a polypeptide of the invention.

[0237] The present invention also provides methods to treat a subject having a disorder characterized by aberrant activity of a polypeptide of the invention or aberrant expression of a nucleic acid of the invention by administering an agent which is a modulator of the activity of a polypeptide of the invention or a modulator of the expression of a nucleic acid of the invention to the subject. In one embodiment, the modulator is a protein of the invention. In another embodiment, the modulator is a nucleic acid of the invention. In other embodiments, the modulator is a peptide, peptidomimetic, or other small molecule.

[0238] The present invention also provides diagnostic assays for identifying the presence or absence of a genetic lesion or mutation characterized by at least one of: (i) aberrant modification or mutation of a gene encoding a polypeptide of the invention, (ii) mis-regulation of a gene encoding a polypeptide of the invention, and (iii) aberrant post-translational modification of the invention wherein a wild-type form of the gene encodes a protein having the activity of the polypeptide of the invention.

[0239] In another aspect, the invention provides a method for identifying a compound that binds to or modulates the activity of a polypeptide of the invention. In general, such methods entail measuring a biological activity of the polypeptide in the presence and absence of a test compound and identifying those compounds which alter the activity of the polypeptide.

[0240] The invention also features methods for identifying a compound which modulates the expression of a polypeptide or nucleic acid of the invention by measuring the expression of the polypeptide or nucleic acid in the presence and absence of the compound

### BRIEF DESCRIPTION OF THE DRAWINGS

[0241] FIG. 1 is a series of sequence comparisons between portions of the amino acid sequence of T85 and a fibronectin type III domain (PF00041) and an Ig superfamily domain (PF00047) derived from a hidden Markov model.

[0242] FIGS. 2A-D depict a comparison of the amino acid sequence of T85 and human Robo protein.

[0243] FIG. 3 depicts an alignment of an amino acid sequence of Tango-77 (T77; SEQ ID NO:2) with IL4RA (SEQ ID NO:14), and IL-1β (SEQ ID NO:15).

[0244] FIG. 4 depicts an alignment of the amino acid sequence of murine SPOIL-I (also referred to as murine or mTANGO 080-1) (corresponding amino acids 1 to 98 of SEQ ID NO:2), murine IL-1ra (Swissprot™ Accession Number P25085) (SEQ ID NO:10), murine IL-1α (Swissprot™ Accession Number P01582) (SEQ ID NO:11) and murine IL-1β (Swissprot™ Accession Number P10749) (SEQ ID NO:12).

[0245] FIGS. 5A-D depict pairwise alignments of SPOIL amino acid sequences of the present invention. FIG. 5A depicts an alignment of human SPOIL-I with human SPOIL-II. FIG. 5B depicts an alignment of murine SPOIL-I with murine SPOIL-II. FIG. 5C depicts an alignment human SPOIL-I with murine SPOIL-I. FIG. 5D depicts an alignment of human SPOIL-II with murine SPOIL-II. The alignments were generated using the ALIGN algorithm (Myers and Miller (1989) CABIOS). Gap penalties were set at −12/−4 and a PAM120 residue weight matrix was used.

[0246] FIG. 6 depicts a multiple sequence alignment of the amino acid sequence of murine SPOIL-I (corresponding to SEQ ID NO:2), the amino acid sequence of murine SPOIL-II (corresponding to SEQ ID NO:25), the amino acid sequence of human SPOIL-I (corresponding to SEQ ID NO:14), and the amino acid sequence of human SPOIL-II (corresponding to SEQ ID NO:18). Asterisks indicate amino acid residues that are conserved between SPOIL family members.

[0247] FIG. 7 depicts a multiple sequence alignment of the amino acid sequence of murine IL-1α (Swissprot™ Accession Number P01582) (SEQ ID NO:11), murine IL-1β (Swissprot™ Accession Number P10749) (SEQ ID NO:12), murine IL-1ra (Swissprot™ Accession Number P25085) (SEQ ID NO:10), the amino acid sequence of murine SPOIL-I (also referred to as murine or mTANGO 080-I) (corresponding amino acids 1 to 98 of SEQ ID NO:2), the amino acid sequence of murine SPOIL-II (also referred to as murine or mTANGO 080-II (corresponding amino acids 1 to 160 of SEQ ID NO:25), the amino acid sequence of human SPOIL-I (corresponding nucleotides 1 to 169 of SEQ ID NO:14), and the amino acid sequence of human SPOIL-II (corresponding to nucleotides 1 to 208 of SEQ ID NO:16). Asterisks indicate amino acid residues that are conserved between SPOIL proteins and IL-1ra.

[0248] FIG. 8 is a diagram depicting the relationship between the NEOKINE proteins of the instant invention. The figure depicts the functional domains of the NEOKINE family members, human NEOKINE-1 (SEQ ID NO:2), mouse NEOKINE-1 (SEQ ID NO:5), rat NEOKINE-1 (SEQ ID NO:8), and macaque NEOKINE-1 (SEQ ID NO:21). The NEOKINE CXC signature motifs are indicated in italics. The conserved cysteine residues are indicated with asterisks.

[0249] FIG. 9 is a hydropathy plot of T129. The location of the predicted transmembrane (TM), cytoplasmic (IN), and extracellular (OUT) domains are indicated as are the position of cysteines (cys; vertical bars immediately below the plot). Relative hydrophilicity is shown above the dotted line, and relative hydrophobicity is shown below the dotted line.

[0250] FIG. 10 depicts a hydropathy plot of human A259. Relatively hydrophobic regions of the protein are above the dashed horizontal line, and relatively hydrophilic regions of the protein are below the dashed horizontal line. The cysteine residues (cys) and potential N-glycosylation sites (Ngly) are indicated by short vertical lines just below the hydropathy trace. The dashed vertical line separates the signal sequence (amino acids 1 to 22 of SEQ ID NO:3; SEQ ID NO:5) on the left from the mature protein (amino acids 23 to 1188 of SEQ ID NO:3; SEQ ID NO:4) on the right. Thicker gray horizontal bars below the dashed horizontal line indicate extracellular (“out”), transmembrane (“TM”), and intracellular (“in”) regions of the molecule.

[0251] FIG. 11 depicts a hydropathy plot of murine A259. Relatively hydrophobic regions of the protein are above the dashed horizontal line, and relatively hydrophilic regions of the protein are below the dashed horizontal line. The cysteine residues (cys) and potential N-glycosylation sites (Ngly) are indicated by short vertical lines just below the hydropathy trace. The dashed vertical line separates the signal sequence (amino acids 1 to 22 of SEQ ID NO:21; SEQ ID NO:23) on the left from the mature protein (amino acids 23 to 1188 of SEQ ID NO:21; SEQ ID NO:22) on the right. Thicker gray horizontal bars below the dashed horizontal line indicate extracellular (“out”), transmembrane (“TM”), and intracellular (“in”) regions of the molecule.

[0252] FIG. 12A depicts an alignment of amino acids 37-90 of human A259 (SEQ ID NO:35) with a consensus integrin alpha repeat domain derived from a hidden Markov model (SEQ ID NO:40).

[0253] FIG. 12B depicts an alignment of amino acids 421-472 of human A259 (SEQ ID NO:36) with a consensus integrin alpha repeat domain derived from a hidden Markov model (SEQ ID NO:40).

[0254] FIG. 12C depicts an alignment of amino acids 476-532 of human A259 (SEQ ID NO:37) with a consensus integrin alpha repeat domain derived from a hidden Markov model (SEQ ID NO:40).

[0255] FIG. 12D depicts an alignment of amino acids 538-593 of human A259 (SEQ ID NO:38) with a consensus integrin alpha repeat domain derived from a hidden Markov model (SEQ ID NO:40).

[0256] FIG. 12E depicts an alignment of amino acids 600-654 of human A259 (SEQ ID NO:39) with a consensus integrin alpha repeat domain derived from a hidden Markov model (SEQ ID NO:40).

[0257] FIG. 13A is a graph depicting the results of an analysis of A259 expression in three normal liver clinical samples (A, B, and C) and eight liver fibrosis clinical samples (D, E, F, G, H, I, J, and K).

[0258] FIG. 13B is a graph depicting the results an analysis of human A259 expression in a variety of cells: heart (A), lung (B), liver (C), passaged stellate cells (D), quiescent stellate cells (E), srellate cells (F) stellate/F BS cells (G), NHDF fibroblasts (H); TGF-treated NHDF fibroblasts (I); NHLF fibroblasts (J); and TGF-treated NHLF fibroblasts (K).

### DETAILED DESCRIPTION OF THE INVENTION

### Delta 3

[0259] Notch, first identified in Drosophila, is the founding member of a family of transmembrane receptor proteins that mediate cell responses to intrinsic and/or extrinsic developmental cues. The cellular response to Notch signaling can be differentiation, proliferation and/or apoptosis depending on the specific developmental program. Defects in the Notch signaling pathway may be involved in neurological, vascular and hematologic diseases.

[0260] Analysis of gene expression patterns for Notch and its ligands has indicated that Notch signaling may have a role in hematopoiesis (Milner and Bigas (1999) Blood 93:2431). Notch-1 was also shown to be involved in determination of T-cell education and fate in the thymus (Robey (1999) An Rev Immunol 17:283). Furthermore, a subset of human T-cell leukemia patients harbor a translocation involving the Notch 1 gene which results in a constitutively active Notch protein (Ellisen et al. (1991) Cell 66:649). Compelling evidence that the Notch signaling pathway is involved in B-cell development is seen in B-cell malignancies induced by Epstein-Barr virus (EBV). EBNA2, the transforming protein of EBV, transactivates cellular genes by direct interaction with a primary component of the Notch pathway (Henkel et al. (1994) Science 265:92).

[0261] It has recently been shown that the human Notch3 gene, located on chromosome 19, is mutated in CADASIL patients (Joutel et al., (1996) Nature 383: 707-710). CADASIL causes a type of stroke and dementia whose key features include recurrent subcortical ischemic events, progressive vascular dementia, craniofacial paralysis, migraine and mood disorders with severe depression (Chabriat et al., (1995) Lancet 346: 934-939). Pathological examination reveals multiple small, deep cerebral infarcts, a leukoencephalopathy and a non-atherosclerotic, non-amyloid angiopathy involving mainly the small cerebral arteries (Baudrimont et al., (1993) Stroke 24: 122-125). Severe alterations of vascular smooth muscle cells are evident on ultrastructural analysis (Ruchoux et al., (1995) Acta. Neuropathol. 89:500-512). Therefore, disruption of the Notch signaling pathway appears to be responsible for CADASIL stroke and dementia. Defects in the Notch signaling pathway may also be involved in other neurological diseases, e.g., Alzheimer's disease.

[0262] The Notch signaling pathway comprises Notch proteins, which are membrane proteins, and proteins interacting with Notch proteins, termed Delta proteins. The product of the Delta gene, acting as a ligand, and that of the Notch gene, acting as a receptor, are key components in a lateral-inhibition signaling pathway that regulates the detailed patterning of many different tissues in Drosophila (Vassin et al., (1987) EMBO J. 6:3431-3440; Kopczynski et al., (1988) Genes Dev. 2:1723-1735; Fehon et al., (1990) Cell 61:523-534; Artavanis-Tsakonas et al., (1991) Trends, Genet. Sci. 7:403-407; Heitzler et al., (1991) Cell 64: 1083-1092; Greenwald et al., (1992) Cell 68: 271-281; Fortini et al., (1993) Cell 75: 124501247; and Muskavitch (1994) Devl. Biol. 166:415-430). During neurogenesis in particular, neural precursors, by expressing Delta, inhibit neighboring Notch-expressing cells from becoming committed to a neural fate. Mutations leading to a failure of lateral inhibition cause an overproduction of neurons, giving rise to a phenotype termed the “neurogenic phenotype” in Drosophila. For example, loss of Notch 1 leads to somite defects and embryonic death in mice, whereas constitutively active mutant forms of Notch 1 appear to inhibit cell differentiation in Xenopus and in cultured mammalian cells (Swiatek et al. (1994) Genes Dev. 8:707; Conlon et al. (1995) J. Development 121:1533; Lopan et al. (1994) Development 120:2385; and Nye et al. (1994) Development 120:2421). Furthermore, loss of Dll1 function in mice leads to excessive neuronal differentiation, resulting in severe patterning defects in the paraxial mesoderm and a hyperplastic central nervous system (CNS) (Hrabe de Angelis et al. (1997) Nature 386:717). Thus, the Notch signaling pathway, in particular Delta proteins, mediate lateral inhibition during neurogenesis so that only a limited proportion of cells having the potential to become neurons will in fact differentiate into neurons.

[0263] The Notch family of proteins are transmembrane receptors containing several conserved peptide motifs. The extracellular domains contain many tandemly repeated copies of an epidermal growth factor (EGF) like motif. The intracellular domains contain six copies of another conserved motif, termed the Cdc10/ankyrin repeat.

[0264] A protein interacting with Notch was first discovered in Drosophila and has been called Delta protein. This protein encodes a transmembrane protein ligand, which contains tandem arrays of epidermal growth factor-like repeats in the extracellular domain. The Delta and Notch proteins can directly bind to each other and specific EGF-like domains are sufficient and necessary for this binding (Fehon et al., (1990) Cell 61:523-534; Rebay et al., (1991) Cell 67:687-699; and Lieber et al., (1992) Neuron 9: 847-859).

[0265] It is also possible that soluble forms of the protein also exist. Such soluble isoforms can arise through variable splicing of the Delta3 gene or alternatively as a result of proteolysis of a membranous isoform. In fact, a splice variant of a chicken Delta protein have been described in PCT Publication No. WO 97/01571 (Jan. 16, 1997). Furthermore, the human Delta-like polypeptide Dlk is a soluble protein (Jansen et al. (1994) Eur. J. Biochem. 225:83-92).

[0266] In addition to the Drosophila Delta protein, a chick Delta ortholog, C-Delta protein (Henrique et al., (1995) Nature 375: 787-790 and GenBank Accession No. U26590) two Xenopus orthologs, X-Delta-1 and X-Delta-2 (Chitnis et al., (1995) Nature 375:761-766 and GenBank Accession Nos. L42229 and U70843), a mouse ortholog (GenBank Accession No. X80903), a delta-like human gene 1(Dlk) (Bettenhausen et al., (1995) Development 121:2407-2418) a rat ortholog (GenBank Accession No. U78889), and a Zebrafish ortholog (GenBank Accession No. Y11760) have been identified.

[0267] The present invention is based at least in part on the discovery of a novel gene encoding a human Delta protein referred to herein as “hDelta3” polypeptide, and the mouse equivalent referred to herein as “mDelta3”. An exemplary hDelta3 has been deposited with the ATCC® on Mar. 5, 1997 and has been assigned ATCC® GenBank Accession Number 98348. The human Delta3 gene maps to human chromosome 15.

[0268] The DNA sequence of human Delta3 including 5′ and 3′ non-coding sequences is shown in SEQ ID NO:1, the coding sequence is shown in SEQ ID NO:3, and the deduced amino acid sequence of the human Delta3 protein is shown in SEQ ID NO: 2. The DNA sequence of mouse Delta3 including 5′ and 3′ non-coding sequences is shown in SEQ ID NO:24 and the coding sequence is shown in SEQ ID NO:26. The deduced amino acid sequence of the mouse Delta3 protein is shown in SEQ ID NO:25.

[0269] Human Delta3 is expressed in endothelial cells and in fact was cloned from a human microvascular endothelial cell library. Northern blot analysis of RNA prepared from a number of different human tissues, indicate that a 3.5 kb Delta3 mRNA transcript is present in fetal brain, lung, liver and kidney, and adult heart, placenta, lung, skeletal muscle, kidney, pancreas, spleen, thymus, prostate, testis, ovary, small intestine and colon. Low levels of Delta3 mRNA were also detected in adult brain and adult liver. However, no Delta3 mRNA was detected in peripheral blood leukocytes. These results indicate that Delta3 is expressed in a tissue-specific manner. Further, expression in human microvascular endothelial cells was found to be up-regulated (about 2-3 fold) in cells that had been stimulated with certain growth factors (e.g., basic fibroblast growth factor (bFGF) or vascular endothelial growth factor (VEGF)). In addition, strong expression of human Delta3 was observed in the colorectal carcinoma cell line, SW480. Furthermore, expression of hDelta3 has been shown to be induced in response to proliferation and differentiation signals (See Examples). Thus, the Delta3 gene, in particular, the hDelta3 gene, is a gene whose expression in a cell changes with the state of proliferative and/or differentiative state of cells.

[0270] In situ hybridization was performed on a wide range of murine adult and embryonic tissues using a probe complementary to mRNA of mDelta3. Expression was most abundant and widespread during embryogenesis. Strongest expression was observed in the eye of all the embryonic ages tested. Signal in a pattern suggestive of neuronal expression was not observed in any other tissues making the expression in the eye unique. Ubiquitous expression was also detected in lung, thymus and brown fat during embryogenesis. A multifocal, scattered signal was also observed throughout the embryo. This signal pattern was more focused in the cortical region of the kidney and outlining the intestinal tract. Adult expression was highest in the ovary and the cortical regions of the kidney and adrenal gland. This is consistent with Delta3's role as a regulator of cell growth and/or differentiation.

[0271] As predicted from the nucleotide sequence of the nucleic acid encoding hDelta3, the novel, full-length hDelta3 polypeptide comprises 685 amino acids and is similar and structure to Delta proteins obtained from other organisms (discussed below). An amino acid sequence analysis of Delta3 proteins predicts that the protein comprises at least the structural domains described herein. First, human and mouse Delta3 have a signal peptide, corresponding to amino acid 1 to amino acid 16, amino acid 1 to amino acid 17, amino acid 1 to amino acid 18, amino acid 1 to amino acid 19 or amino acid 1 to amino acid 20 of SEQ ID NOs: 2 or 25. The signal sequence is normally cleaved during processing of the mature protein. In such embodiments of the invention, the domains and the mature protein resulting from cleavage of such signal peptides are also included herein. For example, the cleavage of a signal sequence consisting of amino acids 1 to 17 results in an extracellular domain consisting of amino acids 18 to 529 of SEQ ID No. 2 and the mature Delta3 polypeptide corresponding to amino acids 18 to 685 of SEQ ID NO: 2.

[0272] Second, human and mouse Delta3 have protein interaction domains such as a Delta Serrated lag-2 (DSL) motif corresponding to amino acid 173 to amino acid 217 of SEQ ID NO: 2 and amino acid 174 to amino acid 218 of SEQ ID NO: 25, as well as eight epidermal growth factor (EGF)-like repeats.

[0273] In addition, Delta3 proteins have a transmembrane domain, i.e., in human Delta3 the transmembrane domain corresponds to about amino acid 530 to about amino acid 553 of SEQ ID NO: 2, and in mouse Delta3, amino acid 531 to amino acid 554 of SEQ ID NO: 25. Delta3 proteins have also have a cytoplasmic domain corresponding to about amino acid 554 to about amino acid 685 of SEQ ID NO: 2 or amino acid 555 to amino acid 686 of SEQ ID NO: 25. Accordingly, sequence analysis for conserved domains of Delta3 amino acid sequence shows that the protein is likely a transmembrane protein having an extracellular domain corresponding to about amino acid 1 to about amino acid 529 of SEQ ID NO:2, about amino acid 18 to about amino acid 529 of SEQ ID NO: 2, amino acid 1 to about amino acid 530 of SEQ ID NO: 25, or amino acid 18 to 530 of SEQ ID NO: 25, said extracellular domain comprising a DSL motif and eight EGF-like domains. The Delta3 protein further comprises a transmembrane domain and a cytoplasmic domain.

[0274] Human Delta3 protein is similar in structure and in sequence to the Delta proteins identified in Drosophila, Xenopus, zebrafish, chicken, rat, mouse, rat, and human. Applicants have aligned known Delta proteins with the Delta3 protein of the present invention. This alignment contains the following Delta proteins: a mouse Delta1 protein (m-delta1), rat Delta-1 protein (r-delta1), a human Delta-1 protein (h-delta1), a Xenopus Delta1 protein (x-delta1), a chicken Delta1 protein (c-delta1), a zebrafish Delta1 protein (z-delta1), a second Xenopus Delta protein (x-delta2), as well as the human Delta3 protein (h-delta3), and a Drosophila Delta1 protein (d-delta). The amino acid sequence of h-delta1 is the amino acid sequence published in PCT Publication WO 97/01571 (Jan. 16, 1997) which is incomplete and contains numerous errors, as stated in the application. Since the amino acid sequence alignment has been done using the pileup computer program (GCG Package), the order of the amino acid sequences reflects the relative identity between the different Delta proteins. Accordingly, the Drosophila protein, which corresponds to the bottom sequence in the alignment is most distant from the other Delta proteins.

[0275] The alignment shows that hDelta3, which is listed second to the last, is the second most distant Delta protein from the previously identified mouse, rat, human, Xenopus, zebrafish, and chicken delta protein. Accordingly, hDelta3 protein is significantly different from the previously described human Delta protein, as well as the Delta proteins from the other species. Interestingly, the hDelta3 protein has an amino acid sequence which is equally distant from both Xenopus proteins, i.e., Delta1 and Delta2, suggesting that hDelta3 does not correspond to either of the Xenopus Delta proteins. Therefore, the newly isolated polypeptide has been termed hDelta3 and the previously identified mouse, rat, human, zebrafish, and Xenopus Delta proteins are termed Delta1 proteins herein and the two Xenopus proteins are termed Delta1 and Delta2 proteins. The difference between hDelta3 protein and previously isolated Delta proteins can also be visualized by comparing the percentage similarity or identity between hDelta3 and the previously identified Delta1 and Delta2 proteins on one hand (Table I), and the percent similarity or identity of a Delta1 protein with the other Delta1 and Delta2 proteins (Table II).

[0276] A hallmark of Notch ligands such as Jagged-1, is the ability to block the differentiation of the C2C12 cell line from myoblasts into myotubes when co-cultured with NIH3T3 cells under low mitogenic conditions. When C2C12 cells were co-cultured with NIH3T3 cells, which were engineered to express hDelta3, differentiation of C2C12 cells from myoblasts to myotubes was blocked in a similar fashion as has been described for other Notch ligands such as Jagged-1. Therefore, the hDelta3 gene is likely to encode a polypeptide which functions as a bona fide Notch ligand. Indeed, the data presented in Section 5.6, below, indicates that hDelta3 is a bona fide Notch ligand.

[0277] Table I indicates the percent similarity and identity between human Delta3, the Delta1 disclosed in PCT Publication No. WO 97/01571 (Jan. 16, 1997) and non-human Delta1 proteins. Since the amino acid sequence of the human Delta1 protein that is disclosed in PCT Publication No. WO 97/01571 (Jan. 16, 1997) is incomplete, the percentage similarity and identity was determined using a portion of the human Delta1 amino acid sequence which seems most reliable. The portion of the amino acid sequence used corresponds to amino acids 214-370 of the human Delta1 amino acid sequence shown in FIG. 11 of the PCT Publication No. WO 97/01571 (Jan. 16, 1997).

TABLE I
Percentage similarity between the amino acid sequence of
human Delta3 (SEQ ID NO: 2) and that of the various Delta proteins

| | Accession | | % | % |
|---|---|---|---|---|
| GenBank | NO: | SEQ ID NO: | identity | similarity |
| Human Delta1 | N.A. | (SEQ ID NO: 6) | 50 | 66 |
| Mouse Delta1 | X80903 | (SEQ ID NO: 4) | 53 | 70 |
| rat Delta1 | U78889 | (SEQ ID NO: 5) | 54 | 70 |
| chicken Delta1 | U26590 | (SEQ ID NO: 8) | 52 | 68 |
| Xenopus Delta1 | L42229 | (SEQ ID NO: 7) | 51 | 68 |
| zebrafish Delta1 | Y11760 | (SEQ ID NO: 9) | 48 | 67 |
| Xenopus Delta2 | U70843 | (SEQ ID NO: 10) | 47 | 65 |
| Drosophila | AA142228 | (SEQ ID NO: 11) | 40 | 58 |
| Delta1 | | | | |
| hDelta-like (dlk) | U15979 | | 33 | 55 |

[0278] Table II indicates the percent similarity and identity between human Delta1 disclosed in PCT Publication No. WO 97/01571 (1997) and non-human Delta1 proteins. Since the amino acid sequence of the human Delta1 protein that is disclosed in PCT Publication No. WO 97/01571 (1997) is incomplete, the percentage similarity and identity was determined using a portion of the human Delta1 amino acid sequence which seems most reliable. The portion of the amino acid sequence used corresponds to amino acids 214-370 of the human Delta1 amino acid sequence shown in FIG. 11 of the PCT application.

TABLE II
Percentage similarity between human Delta1
and the various non-human Delta1 or Delta2 proteins

| | | | | % |
|---|---|---|---|---|
| | | | % | similarity |
| GenBank | Accession | SEQ ID NO: | identity | NO: |
| Human Delta1 | N.A. | (SEQ ID NO: 6) | 100 | 100 |
| mouseDelta1 | X80903 | (SEQ ID NO: 4) | 86 | 95 |
| rat Delta1 | U78889 | (SEQ ID NO: 5) | 88 | 94 |
| chicken Delta1 | U26590 | (SEQ ID NO: 8) | 85 | 89 |
| Xenopus Delta1 | L42229 | (SEQ ID NO: 7) | 78 | 84 |
| zebrafish Delta1 | Y11760 | (SEQ ID NO: 9) | 69 | 80 |
| Xenopus Delta2 | U70843 | (SEQ ID NO: 10) | 57 | 70 |
| Drosophila | AA142228 | (SEQ ID NO: 11) | 45 | 62 |
| Delta1 | | | | |
| hDelta-like (dlk) | U15979 | | 37 | 55 |

[0279] Accordingly, Table I indicates that hDelta3 is only approximately 66% similar to the human Delta1 protein; approximately 70% similar to the mouse Delta1 protein; approximately 70% similar to the rat Delta1 protein; approximately 68% similar to the chick Delta1 protein; approximately 68% similar to the Xenopus Delta1 protein, approximately 70% similar to the Xenopus Delta2 protein and approximately 58% similar to the Drosophila Delta1 protein. However, as shown in Table II, the human-Delta1 protein is very similar to the mouse, rat, chick, Xenopus, zebrafish, and Drosophila Delta1 and the Xenopus Delta2 proteins. In addition, mouse and rat Delta1 proteins are about 95% similar. Thus, the amino acid sequence of the orthologs of the Delta1 protein share greater similarity and identity with each other than with the human Delta3 protein of the invention, indicating that at least two families of Delta proteins exist.

[0280] The difference between the newly isolated hDelta3 protein and the previously identified Delta1 and Delta2 proteins can also be seen by creating a phylogenic tree using the Growtree Phylogram computer program (GCG Package). The result of this analysis, indicates that h-Delta3 is on a different “branch” in the phylogenic tree from the other Delta proteins, thus confirming that hDelta3 protein is more distant from the other Delta1 and Delta2 proteins than they are distant from each other. According to the analysis, and as predicted by the sequence alignment, only the Drosophila Delta protein is more distantly related to the previously identified mouse, rat, Xenopus, chicken, zebrafish and human Delta proteins than hDelta3. Thus, the newly isolated hDelta3 protein is a member of a different subspecies of the family of Delta proteins.

[0281] Notwithstanding that each animal species is likely to have at least two or three members (e.g., Delta1, Delta 2, and Delta3), the DSL region, the eight EGF repeats and the TM appear to be highly conserved throughout species. However, these domains of the hDelta3 protein differ more from the corresponding domains in the other Delta proteins than the corresponding domains in the other Delta differ from one another.

[0282] A comparison of human and mouse Delta3 shows that they are 86.6% identical and 88.2% similar. The polypeptides were aligned with the BLAST program using Blosum62, gap weight 12 and length weight 4. One gap was introduced at amino acid position twenty one due to an extra codon present in mouse Delta3. The skilled artisan will appreciate that the domains identified in hDelta3 protein of the present invention are also present in corresponding positions in mouse Delta3.

[0283] Furthermore, as set forth in the examples presented below, Delta3 has been localized to human chromosome 15 in a region close to the framework markers D15S1244 and D15S144. Interestingly, the region on chromosome 15 that is flanked by the markers D15S1040 and D15S118 has been shown to be genetically linked with the disease called Agenesis of the Corpus Callosum with Peripheral Neuropathy (ACCPN) (Casaubon et al. (1996) Am J. Hum. Genet. 58:28). No specific gene has so far been linked to this disease. Accordingly, since Delta3 is localized to a chromosomal region genetically linked to ACCPN and Delta3 is a member of the Notch signaling pathway, defects in which have been associated with a number of neurological diseases or conditions, Delta3 is likely to be the gene involved in ACCPN.

[0284] ACCPN, which is also termed Andermann syndrome (MIM 218000), is an autosomal recessive disorder that occurs with a high prevalence in the French Canadian population in the Charlevoix and Saguenay-Lac St Jean region in Quebec. The disease is characterized by a progressive peripheral neuropathy caused by axonal degeneration and a central nervous system (CNS) malformation characterized by the absence of hypoplasia of the corpus callosum. The disorder appears early in life, is progressive and results in death in the third decade of life of the subject.

[0285] Accordingly, certain aspects of the present invention relate to Delta3 proteins, nucleic acid molecules encoding Delta3 proteins, antibodies immunoreactive with Delta3 proteins, and preparations of such compositions. In addition, drug discovery assays are provided for identifying agents that modulate the biological function of Delta proteins, e.g., Delta3 proteins (i.e. agonists or antagonists), such as by binding to Delta3 or by altering the interaction of Delta3 with either downstream or upstream elements in the Delta/Notch signal transduction pathway by altering the interaction between Delta3 and a Delta3 binding protein. Such agents can be useful therapeutically, for example, to alter cell growth and/or differentiation or induction of apoptosis. Moreover, the present invention provides diagnostic and therapeutic assays and reagents for detecting and treating disorders involving an aberrant Delta3 activity, for example, aberrant expression (or loss thereof) of Delta3 gene or which are associated with a specific Delta allele, e.g., a Delta3 allele.

[0286] The term “activity,” for the purposes herein refers to an activity exerted by a polypeptide of the invention on a responsive cell as determined, in vivo or in vitro, according to standard techniques. An activity can refer to an effector or antigenic function that is directly or indirectly performed by a Delta3 polypeptide (whether in its native or denatured conformation), or by any subsequence thereof. Effector functions include, for example, receptor binding or activation, induction of differentiation, mitogenic or growth promoting activity, induction of apoptosis, signal transduction, immune modulation, DNA regulatory functions and the like, whether presently known or inherent. Antigenic functions include possession of an epitope or antigenic site that is capable of binding antibodies raised against a naturally-occurring or denatured Delta3 polypeptide or fragment thereof. Accordingly, an activity of a Delta3 protein can be binding to a receptor, such as Notch. An activity of a Delta3 protein can also be modulation of cell proliferation and/or differentiation, or cell death in a target cell having an appropriate receptor. A target cell can be, e.g., a neural cell, an endothelial cell, or a cancer cell.

[0287] The term “aberrant Delta3 activity” or “abnormal Delta3 activity” is intended to encompass an activity of Delta3 which differs from the same Delta3 expression or activity in a healthy subject. An aberrant Delta3 activity can result, e.g., from a mutation in the protein, which results, e.g., in lower or higher binding affinity to a receptor. An aberrant Delta3 activity can also result from a lower or higher level of Delta3 on cells, which can result, e.g., from aberrant transcription, splicing, or translation of the Delta3 gene. For example, an aberrant Delta3 activity can result from an abnormal promoter activity. An aberrant Delta3 activity can also result from an aberrant signalling through the cytoplasmic domain of the Delta3 protein, such that, e.g., an aberrant signal is transduced. Aberrant signalling can result from a mutation in the cytoplasmic domain of Delta3 or, alternatively, from the contact with an abnormal cytoplasmic protein. An aberrant Delta3 activity can also result from contact of a Delta3 protein with an aberrant receptor, e.g., abnormal Notch protein.

[0288] The term “allele”, which is used interchangeably herein with “allelic variant” refers to alternative forms of a gene, nucleic acid or portions thereof, as well as to a polypeptide encoded by said gene, nucleic acid, or portion thereof. Nucleic acid alleles occupy the same locus or position on homologous chromosomes. When a subject has two identical alleles of a gene, the subject is said to be homozygous for the gene or allele. When a subject has two different alleles of a gene, the subject is said to be heterozygous for the gene. Alleles of a specific gene can differ from each other in a single nucleotide, or several nucleotides, and can include substitutions, deletions, and insertions of nucleotides. An allele of a gene can also be a form of a gene containing a mutation.

[0289] The term “allelic variant of a polymorphic region of a Delta3 gene” refers to a region of a Delta gene having one of several nucleotide sequences found in that region of the gene in other individuals, as well as to polypeptides encoded by nucleic acid molecules comprising said sequences.

[0290] The term “agonist”, as used herein, is meant to refer to an agent that upregulates (e.g., potentiates or supplements) Delta3 expression, levels and/or activity. It is to be understood that a Delta3 agonist can include a compound which increases signaling from a Delta3 protein, e.g., a compound bound to Delta3, such as a stimulatory form of a toporythmic protein or a small molecule. A Delta3 agonist can also, for example, be a compound which modulates the expression or activity of a protein which is located upstream or downstream of Delta3 and or which interacts with Delta3.

[0291] “Antagonist” as used herein is meant to refer to an agent that downregulates (e.g., suppresses or inhibits) Delta3 expression, levels and/or activity. A Delta3 antagonist can, for example, be a compound which decreases signalling from a Delta3 protein, e.g., a compound binding to Delta3 such as an inhibitory form of a toporythmic protein, or a small molecule. A Delta3 antagonist can include compounds that inhibit the interaction between a Delta3 protein and another molecule, e.g., a toporythmic protein. A Delta3 antagonist can also be a compound which modulates the expression or activity of a protein which is located upstream or downstream of Delta3 and/or which interacts with Delta3.

[0292] The term “antibody” as used herein refers to immunoglobulin molecules and immunologically active portions of immunoglobulin molecules, i.e., molecules that contain an antigen biding site which specifically binds an antigen, such as a polypeptide of the invention, e.g., an epitope of a polypeptide of the invention. A molecule

[0293] The term “antibody” as used herein refers to immunoglobulin molecules and immunologically active portions of immunoglobulin molecules, i.e., molecules that contain an antigen binding site which specifically binds an antigen, such as a polypeptide of the invention, e.g., an epitope of a polypeptide of the invention. A molecule which specifically binds to a given polypeptide of the invention is a molecule which binds the polypeptide, but does not substantially bind other molecules in a sample, e.g., a biological sample, which naturally contains the polypeptide. Examples of immunologically active portions of immunoglobulin molecules include F(ab) and F(ab′)₂ fragments which can be generated by treating the antibody with an enzyme such as pepsin. The invention provides polyclonal and monoclonal antibodies. The term “monoclonal antibody” or “monoclonal antibody composition”, as used herein, refers to a population of antibody molecules that contain only one species of an antigen binding site capable of immunoreacting with a particular epitope.

[0294] “Cells,” “host cells” or “recombinant host cells” are terms used interchangeably herein. It is understood that such terms refer not only to the particular subject cell but to the progeny or potential progeny of such a cell. Because certain modifications may occur in succeeding generations due to either mutation or environmental influences, such progeny may not, in fact, be identical to the parent cell, but are still included within the scope of the term as used herein.

[0295] “Complementary” sequences as used herein refer to sequences which have sufficient complementarity to be able to hybridize, forming a stable duplex.

[0296] A “delivery complex” shall mean a targeting means (e.g., a molecule that results in higher affinity binding of a gene, protein, polypeptide or peptide to a target cell surface and/or increased cellular uptake by a target cell). Examples of targeting means include: sterols (e.g., cholesterol), lipids (e.g., a cationic lipid, virosome or liposome), viruses (e.g., adenovirus, adeno-associated virus, and retrovirus) or target cell specific binding agents (e.g., ligands recognized by target cell specific receptors). Preferred complexes are sufficiently stable in vivo to prevent significant uncoupling prior to internalization by the target cell. However, the complex is cleavable under appropriate conditions within the cell so that the gene, protein, polypeptide or peptide is released in a functional form.

[0297] As is well known, genes for a particular polypeptide may exist in single or multiple copies within the genome of an individual. Such duplicate genes may be identical or may have certain modifications, including nucleotide substitutions, additions or deletions, which all still code for polypeptides having substantially the same activity. The term “DNA sequence encoding a Delta3 polypeptide” may thus refer to one or more genes within a particular individual. Moreover, certain differences in nucleotide sequences may exist between individual organisms, which are called alleles. Such allelic differences may or may not result in differences in amino acid sequence of the encoded polypeptide yet still encode a protein with the same biological activity.

[0298] The term “Delta3 therapeutic” refers to various compositions of Delta3 modulators (e.g., agonists or antagonists), such as polypeptides, antibodies, peptidomimetics, small molecules and nucleic acids which are capable of mimicking or potentiating (agonizing) or inhibiting suppressing (antagonizing) Delta3 expression, levels, or activity, e.g., which are capable of agonizing or antagonizing the effects of a naturally-occurring Delta3 protein.

[0299] The terms “Delta3 polypeptide” and “Delta3 protein” are intended to encompass, e.g., Delta3 polypeptides which have at least one activity of a native Delta3 polypeptide, or can, e.g., antagonize or agonize at least one biological activity of a native Delta3 polypeptide.

[0300] A “fusion protein” is a fusion of a first amino acid sequence encoding one of the subject Delta3 polypeptides with a second, heterologous amino acid sequence. In general, a fusion protein can be represented by the general formula X-Delta3-Y, wherein Delta3 represents a portion of the protein which is derived from one of the Delta3 proteins of the invention, and X and Y are independently absent or represent amino acid sequences which are heterologous to (that is, not related to) one of the Delta3 sequences in an organism, including naturally-occurring mutants. Among the Delta3 fusion protein is a Delta3-Ig fusion protein.

[0301] As used herein, the term “gene” or “recombinant gene”, as applied to Delta3, refers to a nucleic acid molecule comprising an open reading frame encoding one of the Delta3 polypeptides of the present invention. In one embodiment, these terms relate to a cDNa sequence including, but not limited to a nucelci acid sequence obtained via reverse transcription of an mRNA molecule.

[0302] The term “growth state” of a cell refers to the proliferative state of a cell as well as to its differentiative state. Accordingly, the term refers to the phase of the cell cycle in which the cell is, e.g., G0, G1, G2, prophase, metaphase, or telophase, as well as to its state of differentiation, e.g., undiffereniated, partially differentiated, or fully differentiated. Without wanting to be limited, differentiation of a cell is usually accompanied by a decrease in the proliferative rate of a cell.

[0303] “Homology” or “identity” or “similarity” refers to sequence similarity between two peptides or between two nucleic acid molecules. Homology can be determined by comparing a position in each sequence which may be aligned for purposes of comparison. When a position in the compared sequence is occupied by the same base or amino acid, then the molecules are identical at that position. A degree of homology or similarity or identity between nucleic acid sequences is a function of the number of identical or matching nucleotides at positions shared by the nucleic acid sequences. A degree of identity of amino acid sequences is a function of the number of identical amino acids at positions shared by the amino acid sequences. Likewise, a degree of identity of nucleic acid sequences is a function of the number of identical nucleic acids at positions shared by the nucleic acid sequences.

[0304] Furthermore, a degree of homology or similarity of amino acid sequences is a function of the number of conserved amino acids at positions shared by the amino acid sequences. A sequence which is “unrelated” or “non-homologous” with one of the hDelta3 sequences of the present invention typically is a sequence which shares less than 40% identity, though preferably less than 25% identity with one of the hDelta3 sequences of the present invention.

[0305] To determine the percent identity of two amino acid sequences or of two nucleic acids, the sequences are aligned for optimal comparison purposes (e.g., gaps can be introduced in the sequence of a first amino acid or nucleic acid sequence for optimal alignment with a second amino or nucleic acid sequence). The amino acid residues or nucleotides at corresponding amino acid positions or nucleotide positions are then compared. When a position in the first sequence is occupied by the same amino acid residue or nucleotide as the corresponding position in the second sequence, then the molecules are identical at that position. The percent identity between the two sequences is a function of the number of identical positions shared by the sequences (i.e., % identity=# of identical positions/total # of positions (e.g., overlapping positions)×100). In one embodiment the two sequences are the same length. In another embodiment, the mouse Delta3 polypeptide is one amino acid longer than human Delta3.

[0306] Preferably, the determination of percent identity between two sequences is accomplished using a mathematical algorithm. A preferred, non-limiting example of a mathematical algorithm utilized for the comparison of two sequences is the algorithm of Karlin and Altschul (1990) Proc. Natl. Acad. Sci. USA 87:2264-2268, modified as in Karlin and Altschul (1993) Proc. Natl. Acad. Sci. USA 90:5873-5877. Such an algorithm is incorporated into the NBLAST and XBLAST programs of Altschul, et al. (1990) J. Mol. Biol. 215:403-410. BLAST nucleotide searches can be performed with the NBLAST program, score=100, wordlength=12 to obtain nucleotide sequences homologous to a nucleic acid molecules of the invention. BLAST protein searches can be performed with the XBLAST program, score=50, wordlength=3 to obtain amino acid sequences homologous to a protein molecules of the invention. To obtain gapped alignments for comparison purposes, Gapped BLAST can be utilized as described in Altschul et al. (1997) Nucleic Acids Res. 25:3389-3402. Alternatively, PSI-Blast can be used to perform an iterated search which detects distant relationships between molecules. Id. When utilizing BLAST, Gapped BLAST, and PSI-Blast programs, the default parameters of the respective programs (e.g., XBLAST and NBLAST) can be used. Another preferred, non-limiting example of a mathematical algorithm utilized for the comparison of sequences is the algorithm of Myers and Miller, (1988) CABIOS 4:11-17. Such an algorithm is incorporated into the ALIGN program (version 2.0) which is part of the GCG sequence alignment software package. When utilizing the ALIGN program for comparing amino acid sequences, a PAM120 weight residue table, a gap length penalty of 12, and a gap penalty of 4 can be used.

[0307] As used herein, the term “hybridizes under stringent conditions” is intended to describe conditions for hybridization and washing under which nucleotide sequences at least 60% (65%, 70%, preferably 75% or more) identical to each other typically remain hybridized to each other. Such stringent conditions are known to those skilled in the art and can be found in Current Protocols in Molecular Biology, John Wiley & Sons, N.Y. (1989), 6.3.1-6.3.6, which describes aqueous and non-aqueous methods, either of which can be used. Another preferred, non-limiting example of stringent hybridization conditions are hybridization in 6× sodium chloride/sodium citrate (SSC) at about 45_C, followed by one or more washes in 2.0×SSC at 50° C. (low stringency) or 0.2×SSC, 0.1% SDS at 50-65_C (high stringency). Another preferred example of stringent hybridization conditions are hybridization in 6× sodium chloride/sodiumcitrate (SSC) at about 45□C., followed by one or more washes in 0.2×SSC, 0.1% SDS at 50□C. Another example of stringent hybridization conditions are hybridization in 6× sodium chloride/sodium citrate (SSC) at about 45□C., followed by one or more washes in 0.2×SSC, 0.1% SDS at 55□C. A further example of stringent hybridization conditions are hybridizationin 6× sodium chloride/sodium citrate (SSC) at about 45□C., followed by one or more washes in 0.2×SSC, 0.1% SDS at 60□C. Preferably, stringent hybridization conditions are hybridization in 6× sodium chloride/sodium citrate (SSC) at about 45□C., followed by one or more washes in 0.2×SSC, 0.1% SDS at 65□C. Particularly preferred stringency conditions (and the conditions that should be used if the practitioner is uncertain about what conditions should be applied to determine if a molecule is within a hybridization limitation of the invention) are 0.5M Sodium Phosphate, 7% SDS at 65□C., followed by one or more washes at 0.2×SSC, 1% SDS at 65□C. In one embodiment, an isolated nucleic acid molecule of the invention that hybridizes under stringent conditions to the sequence of SEQ ID NOs: 1, 3, 24, 26, 27, 29, 31, 33, 35, 37, 39, 41, 43 or 45, or complement thereof, corresponds to a naturally-occurring nucleic acid molecule.

[0308] The term “interact” as used herein is meant to include detectable interactions between molecules, such as can be detected using, for example, a yeast two hybrid assay. The term interact is also meant to include “binding” interactions between molecules. Interactions may be, e.g., protein-protein, protein-nucleic acid, protein-small molecule, or nucleic acid-small molecule in nature.

[0309] The term “modulation” as used herein refers to both upregulation, i.e., stimulation, and downregulation, e.g., suppression, of a response.

[0310] The term “mutated gene” refers to an allelic form of a gene, which is capable of altering the phenotype of a subject having the mutated gene relative to a subject which does not have the mutated gene. If a subject must be homozygous for this mutation to have an altered phenotype, the mutation is said to be recessive. If one copy of the mutated gene is sufficient to alter the genotype of the subject, the mutation is said to be dominant. If a subject has one copy of the mutated gene and has a phenotype that is intermediate between that of a homozygous and that of a heterozygous (for that gene) subject, the mutation is said to be co-dominant. As used herein, a “naturally-occurring” nucleic acid molecule refers to an RNA or DNA molecule having a nucleotide sequence that occurs in nature (e.g., encodes a natural protein).

[0311] The “non-human animals” of the invention include mammalians such as rodents, non-human primates, sheep, dog, cow, chickens, amphibians, reptiles, etc. Preferred non-human animals are selected from the rodent family including rat and mouse, most preferably mouse, though transgenic amphibians, such as members of the Xenopus genus, and transgenic chickens can also provide important tools for understanding and identifying agents which can affect, for example, embryogenesis and tissue formation. The term “chimeric animal” is used herein to refer to animals in which the recombinant gene is found, or in which the recombinant is expressed in some but not all cells of the animal. The term “tissue-specific chimeric animal” indicates that one of the recombinant Delta3 genes is present and/or expressed or disrupted in some tissues but not others.

[0312] As used herein, the term “nucleic acid molecule” is intended to include DNA molecules and RNA molecules (e.g., mRNA) and analogs of the DNA or RNA generated using nucleotide analogs. The nucleic acid molecule can be single-stranded or double-stranded, but preferably is double-stranded DNA. An “isolated” nucleic acid molecule is one which is separated from other nucleic acid molecules which are present in the natural source of the nucleic acid molecule. Preferably, an “isolated” nucleic acid molecule is free of sequences (preferably protein encoding sequences) which naturally flank the nucleic acid (i.e., sequences located at the 5′ and 3′ ends of the nucleic acid) in the genomic DNA of the organism from which the nucleic acid is derived. In other embodiments, the “isolated” nucleic acid is free of intron sequences. For example, in various embodiments, the isolated nucleic acid molecule preferably includes no more than 10 kilobases (kb), and more preferably, contains less than about 5 kB, 4 kB, 3 kB, 2 kB, 1 kB, 0.5 kB or 0.1 kB of nucleotide sequences which naturally flank the nucleic acid molecule in genomic DNA of the cell from which the nucleic acid is derived. Moreover, an “isolated” nucleic acid molecule, such as a cDNA molecule, can be substantially free of other cellular material, viral material, or culture medium when produced by recombinant techniques, or substantially free of chemical precursors or other chemicals when chemically synthesized.

[0313] The terms “protein”, “polypeptide” and “peptide” are used interchangably herein. The term “substantially free of other cellular proteins” (also referred to herein as “contaminating proteins”) or “substantially pure or purified preparations” are defined as encompassing preparations of Delta3 polypeptides having less than about 20% (by dry weight) contaminating protein, and preferably having less than about 5% contaminating protein. Functional forms of the subject polypeptides can be prepared, for the first time, as purified or isolated preparations by using a cloned gene as described herein. By “purified” or “isolated,” it is meant, when referring to a protein of the invention, that the indicated molecule is present in the substantial absence of other biological macromolecules, such as other proteins. The term “purified” or “isolated” as used herein preferably means at least 80% by dry weight, more preferably in the range of 95-99% by weight, and most preferably at least 99.8% by weight, of biological macromolecules of the same type present (but water, buffers, and other small molecules, especially molecules having a molecular weight of less than about 5000, can be present). The term “pure” or “isolated” as used herein preferably has the same numerical limits as “purified” or “isolated” immediately above. “Isolated” and “purified” do not encompass either natural materials in their native state or natural materials that have been separated into components (e.g., in an acrylamide gel) but not obtained either as pure (e.g., lacking contaminating proteins, or chromatography reagents such as denaturing agents and polymers, e.g., acrylamide or agarose) substances or solutions. In preferred embodiments, purified or isolated Delta3 preparations will lack any contaminating proteins from the same animal from which Delta3 is normally produced, as can be accomplished by recombinant expression of, for example, a human Delta3 protein in a non-human cell.

[0314] As used herein, the term “tissue-specific promoter” means a DNA sequence that serves as a promoter, i.e., regulates expression of a selected DNA sequence operably linked to the promoter, and which effects expression of the selected DNA sequence in specific cells of a tissue, such as cells of cardiac, hepatic or pancreatic origin, neuronal cells, or immune cells. The term also covers so-called “leaky” promoters, which regulate expression of a selected DNA primarily in one tissue, but cause expression in other tissues as well.

[0315] “Transcriptional regulatory sequence” is a generic term used throughout the specification to refer to DNA sequences, such as initiation signals, enhancers, and promoters, which induce or control transcription of protein coding sequences with which they are operably linked. In certain embodiments, transcription of one of the recombinant Delta3 genes is under the control of a promoter sequence (or other transcriptional regulatory sequence) which controls the expression of the recombinant gene in a cell-type in which expression is intended. It will also be understood that the recombinant gene can be under the control of transcriptional regulatory sequences which are the same or which are different from those sequences which control transcription of the naturally-occurring forms of Delta3 proteins.

[0316] As used herein, the term “transfection” means the introduction of a nucleic acid, e.g., an expression vector, into a recipient cell by nucleic acid-mediated gene transfer. “Transformation”, as used herein, refers to a process in which a cell's genotype is changed as a result of the cellular uptake of exogenous DNA or RNA, and, for example, the transformed cell expresses a recombinant form of a Delta3 polypeptide or, in the case of anti-sense expression from the transferred gene, the expression of a naturally-occurring form of the Delta3 protein is disrupted.

[0317] As used herein, the term “transgene” means a nucleic acid sequence (encoding, e.g., one of the Delta3 polypeptides, or an antisense transcript thereto), which is partly or entirely heterologous, i.e., foreign, to the transgenic animal or cell into which it is introduced, or, is homologous to an endogenous gene of the transgenic animal or cell into which it is introduced, but which is designed to be inserted, or is inserted, into the animal's genome in such a way as to alter the genome of the cell into which it is inserted (e.g., it is inserted at a location which differs from that of the natural gene or its insertion results in a knockout). A transgene can include one or more transcriptional regulatory sequences and any other nucleic acid, such as introns, that may be necessary for optimal expression of a selected nucleic acid.

[0318] A “transgenic animal” refers to any non-human animal, preferably a non-human mammal, bird or an amphibian, in which one or more of the cells of the animal contain heterologous nucleic acid (“transgene”) introduced by way of human intervention, such as by transgenic techniques well known in the art. The nucleic acid is introduced into the cell, directly or indirectly by introduction into a precursor of the cell, by way of deliberate genetic manipulation, such as by microinjection or by infection with a recombinant virus. The term genetic manipulation does not include classical cross-breeding, or in vitro fertilization, but rather is directed to the introduction of a recombinant DNA molecule. This molecule may be integrated within a chromosome, or it may be extrachromosomally replicating DNA. In the typical transgenic animals described herein, the transgene causes cells to express a recombinant form of one of the Delta3 proteins, e.g., either agonistic or antagonistic forms. However, transgenic animals in which the recombinant Delta3 gene is silent are also contemplated, as for example, the FLP or CRE recombinase dependent constructs described below. Moreover, “transgenic animal” also includes those recombinant animals in which gene disruption of one or more Delta3 genes is caused by human intervention, including both recombination and antisense techniques. A “homologous recombinant animal” is a non-human animal, preferably a mammal, more preferably a mouse, in which an endogenous gene has been altered by homologous recombination between the endogenous gene and an exogenous DNA molecule introduced into a cell of the animal, e.g., an embryonic cell of the animal, prior to development of the animal.

[0319] As used herein, the term “vector” refers to a nucleic acid molecule capable of transporting another nucleic acid to which it has been linked. One type of preferred vector is an episome, i.e., a nucleic acid capable of extra-chromosomal replication. Preferred vectors are those capable of autonomous replication and/expression of nucleic acids to which they are linked. Vectors capable of directing the expression of genes to which they are operatively linked are referred to herein as “expression vectors”. In general, expression vectors of utility in recombinant DNA techniques are often in the form of “plasmids” which refer generally to circular double stranded DNA loops which, in their vector form are not bound to the chromosome. However, the invention is intended to include such other forms of expression vectors which serve equivalent functions and which become known in the art subsequently hereto.

[0320] The term “treating” as used herein is intended to encompass curing as well as ameliorating at least one symptom of the condition or disease.

[0321] The percent identity between two sequences can be determined using techniques similar to those described above, with or without allowing gaps. In calculating percent identity, typically only exact matches are counted.

### FTHMA-070 and T85

[0322] The present invention is based, in part, on the discovery of a cDNA molecule encoding human FTHMA-070, a member of the TNF receptor superfamily.

[0323] A nucleotide sequence encoding a human FTHMA-070 protein is shown in SEQ ID NO:53 and SEQ ID NO:55 (open reading frame only). A predicted amino acid sequence of FTHMA-070 protein is also shown in SEQ ID NO:54.

[0324] The FTHMA-070 cDNA of SEQ ID NO:53, which is approximately 2133 nucleotides long including untranslated regions, encodes a 401 amino acid protein.

[0325] Human FTHMA-070 is one member of a family of molecules (the “FTHMA-070 family”) having certain conserved structural and functional features. The term “family” when referring to the protein and nucleic acid molecules of the invention is intended to mean two or more proteins or nucleic acid molecules having a common structural domain and having sufficient amino acid or nucleotide sequence identity as defined herein. Such family members can be naturally occurring and can be from either the same or different species. For example, a family can contain a first protein of human origin and a homologue of that protein of murine origin, as well as a second, distinct protein of human origin and a murine homologue of that protein. Members of a family may also have common functional characteristics.

[0326] As used interchangeably herein a “FTHMA-070 activity”, “biological activity of FTHMA-070” or “functional activity of FTHMA-070”, refers to an activity exerted by a FTHMA-070 protein, polypeptide or nucleic acid molecule on a FTHMA-070 responsive cell as determined in vivo, or in vitro, according to standard techniques. A FTHMA-070 activity can be a direct activity, such as an association with or an enzymatic activity on a second protein or an indirect activity.

[0327] Accordingly, another embodiment of the invention features isolated FTHMA-070 proteins and polypeptides having a FTHMA-070 activity.

[0328] Yet another embodiment of the invention features FTHMA-070 molecules which contain a signal sequence. Generally, a signal sequence (or signal peptide) is a peptide containing about 20 amino acids which occurs at the extreme N-terminal end of secretory and integral membrane proteins and which contains large numbers of hydrophobic amino acid residues and serves to direct a protein containing such a sequence to a lipid bilayer.

[0329] The present invention is also based, in part, on the discovery of a cDNA molecule encoding human T85, a protein which appears to be a secreted (non-membrane bound) form of human Robo protein, a protein which is a nerve axon guidance receptor.

[0330] A nucleotide sequence encoding a human T85 protein is shown in SEQ ID NO:57 and SEQ ID NO:59 (open reading frame only). A predicted amino acid sequence of FTHMA-070 protein is also shown in SEQ ID NO:58.

[0331] The FTHMA-070 cDNA of SEQ ID NO:57, which is approximately 4291 nucleotides long including untranslated regions, encodes a 753 amino acid protein. Human T85 is one member of a family of molecules (the “T85 family”) having certain conserved structural and functional features. The term “family” when referring to the protein and nucleic acid molecules of the invention is intended to mean two or more proteins or nucleic acid molecules having a common structural domain and having sufficient amino acid or nucleotide sequence identity as defined herein. Such family members can be naturally occurring and can be from either the same or different species. For example, a family can contain a first protein of human origin and a homologue of that protein of murine origin, as well as a second, distinct protein of human origin and a murine homologue of that protein. Members of a family may also have common functional characteristics.

[0332] In one embodiment, a T85 protein includes a fibronectin type III domain having at least about 65%, preferably at least about 75%, and more preferably about 85%, 95%, or 98% amino acid sequence identity to a fibronectin type III domain of SEQ ID NO:61, or 62.

[0333] In one embodiment, a T85 protein includes an Ig superfamily domain having at least about 65%, preferably at least about 75%, and more preferably about 85%, 95%, or 98% amino acid sequence identity to an Ig superfamily domain of SEQ ID NO:63, 64, 65, 66, or 67.

[0334] Preferred T85 polypeptides of the present invention have an amino acid sequence sufficiently identical to a sequence identity to a fibronectin type III domain of SEQ ID NO:61 or 62 or an Ig superfamily domain of SEQ ID NO:63, 64, 65, 66, or 67. As used herein, the term “sufficiently identical” refers to a first amino acid or nucleotide sequence which contains a sufficient or minimum number of identical or equivalent (e.g., an amino acid residue which has a similar side chain) amino acid residues or nucleotides to a second amino acid or nucleotide sequence such that the first and second amino acid or nucleotide sequences have a common structural domain and/or common functional activity. For example, amino acid or nucleotide sequences which contain a common structural domain having about 65% identity, preferably 75% identity, more preferably 85%, 95%, or 98% identity are defined herein as sufficiently identical.

[0335] As used interchangeably herein a “T85 activity”, “biological activity of T85” or “functional activity of T85”, refers to an activity exerted by a T85 protein, polypeptide or nucleic acid molecule on a T85 responsive cell as determined in vivo, or in vitro, according to standard techniques. A T85 activity can be a direct activity, such as an association with or an enzymatic activity on a second protein.

[0336] Accordingly, another embodiment of the invention features isolated T85 proteins and polypeptides having a T85 activity.

[0337] Yet another embodiment of the invention features T85 molecules which contain a signal sequence. Generally, a signal sequence (or signal peptide) is a peptide containing about 20 amino acids which occurs at the extreme N-terminal end of secretory and integral membrane proteins and which contains large numbers of hydrophobic amino acid residues and serves to direct a protein containing such a sequence to a lipid bilayer.

### TANGO 77

[0338] The polypeptide cytokine interleukin-1 (IL-1) is a critical mediator of inflammatory and overall immune response. To date, three members of the IL-1 family, IL-1α, IL-1β and IL-1ra (Interleukin-1 receptor antagonist) have been isolated and cloned. IL-1α and IL-1β are proinflammatory cytokines which elicit biological responses, whereas IL-1ra is an antagonist of IL-1α and IL-18 activity. Two distinct cell-surface receptors have been identified for these ligands, the type 1 IL-1 receptor (IL-1RtI) and type II IL-1 receptor (IL-1RtII). Recent results suggest that the IL-1 RtI is the receptor responsible for transducing a signal and producing biological effects.

[0339] While inflammation is an important homeostatic mechanism, aberrant inflammation has the potential for inducing damage to the host. Elevated IL-1 levels are known to be associated with a number of diseases particularly autoimmune diseases and inflammatory disorders. Since II-1ra is a naturally occurring inhibitor of IL-1, IL-1ra can be used to limit the aberrant and potentially deleterious effects of IL-1. In experimental animals, pretreatment with IL-1ra has been shown to prevent death resulting from lipopolysaccharide-induced sepsis. The relative absence of IL-1ra has also been suggested to play a role in human inflammatory bowel disease.

[0340] The present invention is based on the discovery of a cDNA molecule encoding human Tango-77, a member of the cytokine superfamily. The cDNA molecule encoding human Tango-77 has three possible open reading frames. The three possible nucleotide open reading frames for human Tango-77 protein are shown in SEQ ID NO:73, SEQ ID NO:76 and SEQ ID NO:80. The predicted amino acid sequence for the three possible Tango-77 immature proteins are shown in SEQ ID NO:72, SEQ ID NO:77 or SEQ ID NO:81 and three possible mature proteins are shown in SEQ ID NO:75, SEQ ID NO:79 and SEQ ID NO:83.

[0341] The Tango-77 cDNA of SEQ ID NO:71, which is approximately 989 nucleotides long including untranslated regions, encodes a protein amino acid having a molecular weight of approximately 19 kDa, 18 kDa, or 14.9 KDa (excluding post-translational modifications) and the possible mature form of the protein has a molecular weight of 13 kDa. A plasmid containing a cDNA encoding human Tango-77 (with the cDNA insert name of Of fthx077) was deposited with American Type Culture Collection (ATCC), 10801 University Boulevard, Manassas, Va. 20110-2209 on Jul. 2, 1998 and assigned Accession Number 98807. This deposit will be maintained under the terms of the Budapest Treaty on the International Recognition of the Deposit of Microorganisms for the Purposes of Patent Procedure. This deposit was made merely as a convenience for those of skill in the art and is not an admission that a deposit is required under 35 U.S.C. §112.

[0342] Human Tango-77 is one member of a family of molecules (the “Tango-77 family”) having certain conserved structural and functional features. The term “family,” when referring to the protein and nucleic acid molecules of the invention, is intended to mean two or more proteins or nucleic acid molecules having a common structural domain and having sufficient amino acid or nucleotide sequence identity as defined herein. Such family members can be naturally occurring and can be from either the same or different species. For example, a family can contain a first protein of human origin and a homologue of that protein of murine origin, as well as a second, distinct protein of human origin and a murine homologue of that protein. Members of a family may also have common functional characteristics.

[0343] As used interchangeably herein a “Tango-77 activity”, “biological activity of Tango-77” or “functional activity of Tango-77”, refers to an activity exerted by a Tango-77 protein, polypeptide or nucleic acid molecule on a Tango-77 responsive cell as determined in vivo, or in vitro, according to standard techniques. A Tango-77 activity can be a direct activity, such as an association with a second protein, or an indirect activity, such as a cellular signaling activity mediated by interaction of the Tango-77 protein with a second protein. In a preferred embodiment, a Tango-77 activity includes at least one or more of the following activities: (i) the ability to interact with proteins in the Tango-77 signalling pathway (ii) the ability to interact with a Tango-77 ligand or receptor; or (iii) the ability to interact with an intracellular target protein, (iv) the ability to interact with a protein involved in inflammation, and (v) the ability to bind the IL-1 receptor.

[0344] Accordingly, another embodiment of the invention features isolated Tango-77 proteins and polypeptides having a Tango-77 activity.

[0345] Yet another embodiment of the invention features Tango-77 molecules which contain a signal sequence. Generally, a signal sequence (or signal peptide) is a peptide containing about 21 to 63 amino acids which occurs at the extreme N-terminal end of a secretory protein. The native Tango-77 signal sequence (SEQ ID NO:74, SEQ ID NO:78, or SEQ ID NO:82) can be removed and replaced with a signal sequence from another protein. In certain host cells (e.g., mammalian host cells), expression and/or secretion of Tango-77 can be increased through use of a heterologous signal sequence. For example, the gp67 secretory sequence of the baculovirus envelope protein can be used as a heterologous signal sequence. Alternatively, the native Tango-77 signal sequence can itself be used as a heterologous signal sequence in expression systems, e.g., to facilitate the secretion of a protein of interest.

### SPOIL

[0346] Interleukin-1 (IL-1) is a multifunctional cytokine which comprises a family of two polypeptides, IL-1α and IL-1β, with a wide spectrum of activities. IL-1α and IL-1β have been found to possess inflammatory, metabolic, physiologic, hematopoeitic and immunologic properties. Although both forms of IL-1 are distinct gene products, they recognize the same cell surface receptors (i.e. IL-1 receptors, IL-1RtI and IL-1RtII).

[0347] Besides skin keratinocytes, some epithelial cells and certain cells in the central nervous system, significant amounts of mRNA encoding IL-1 are not observed in most other healthy cells. However, IL-1 production is dramatically increased by a variety of cells in response to infection, microbial toxins, inflammatory agents, products of activated lymphocytes, complement and clotting components. In addition, IL-1 has been recognized as a prototype of proinflammatory cytokines in that it induces the expression of a variety of genes and the synthesis of several proteins that in turn, induce acute and chronic inflammation. Thus, circulating IL-1 has been implicated in various disease states including sepsis, rheumatoid arthritis, stroke and diabetes. Dinarello (1991) Blood 77(8):1627-1652.

[0348] In addition, IL-1 has been shown to regulate bone reabsorption and bone formation with its major activity in bone metabolism being osteoclast activation. See Gowen et al. (1983) Nature 306:378-380. In fact, IL-1 has been reported to be a potent stimulator of bone reabsorption and has also been reported to increase prostaglandin synthesis in bone. Lorenzo et al. (1987) Endocrinology 121:1164-1170.

[0349] A naturally-occurring, secreted inhibitor of IL-1 which specifically inhibits IL-1 activity has also been identified. Carter et al. (1990) Nature 344:633. This protein, called IL-1 receptor antagonist protein (IL-1ra), has been shown to compete with the binding of IL-1 to its surface receptors. Thus, significant interest has arisen in administering IL-1ra to block the activity of IL-1 in various diseases including septic shock (Ohlsson et al. (1990) Nature 348:550-556), immune complex-induced colitis (Cominelli (1990) J. Clin. Invest. 86:972-979), acute myelogenous leukemia (Rambaldi et al. (1990) Blood 76:114-120) and osteoporosis (Pacifici et al. (1993) J. Clin. Endocrinol. Metab. 77:1135-1141). Further research has indicated that the secreted form of IL-1ra is, in fact, a member of a family of IL-1ra proteins, at least three of which are intracellular proteins (Haskill et al. (1991) Proc. Natl. Acad. Sci. USA 88:3681-3685; Muzio et al. (1995) J. Exp. Med. 182:623-628; and Weissbach et al. (1998) Biochem. Biophys. Res. Comm. 244:91-95. The family members are alternatively spliced isoforms of the IL-ra gene which consists of at least seven exons. A truncated form of the fourth exon is produced as a result of an internal splice acceptor site, resulting in the secreted isoform.

[0350] The present invention is based on the discovery of novel molecules having homology to members of the IL-1 receptor antagonist (IL-1ra) family, referred to herein as SPOIL protein and nucleic acid molecules. The SPOIL proteins and nucleic acid molecules comprise a family of molecules having certain conserved structural and functional features. The term “family” when referring to the protein and nucleic acid molecules of the invention is intended to mean two or more protein or nucleic acid molecules having a common structural domain and having sufficient amino acid or nucleotide sequence identity as defined herein. Such family members can be naturally occurring and can be from either the same or different species. For example, a family can contain a first protein of human origin, as well as other, distinct proteins of human origin or alternatively, can contain homologues of non-human origin (e.g., mouse). Members of a family may also have common functional characteristics.

[0351] For example, an isolated protein of the invention, preferably a SPOIL protein, is identified based on the presence of at least one “IL-1 signature domain” in the protein or corresponding nucleic acid molecule. As used herein, the term “IL-1 signature domain” refers to a protein domain which contains a conserved motif of a SPOIL protein member (or IL-1ra or IL-1 family member) and is at least about 10-30 amino acid residues, preferably about 15-25 amino acid residues, more preferably about 17-24 amino acid residues, more preferably 19-23 amino acid residues, and more preferably 21-22 amino acid residues in length. An IL-1 signature domain includes the following amino acid motif: Xaa₁-Xaa₂-S-Xaa₃-Xaa₄-Xaa₅-P-Xaa₆-Xaa₇-Xaa₉-Xaa₉-Xaa₁₀-Xaaₙ-Xaa₁₁, wherein Xaa₁, Xaa₂, Xaa₄, Xaa₅, Xaa₆, Xaa₇, and Xaaₙ represents any amino acid residue; Xaa₃ is alanine (A), serine (S), leucine (L) or valine (V); Xaa₉ is phenylalanine (F), tyrosine (Y), leucine (L), isoleucine (I) or valine (V); Xaa₉ is either leucine (L) or isoleucine (I); Xaa₁₀ is serine (S), cysteine (C) or alanine (A); Xaa₁₁ is leucine (L), isoleucine (I), valine (V) or methionine (M); and n is about 5-25 amino acid residues, more preferably about 6-18 amino acid residues, and more preferably about 6-15 amino acid residues (SEQ ID NO:107). In one embodiment, an IL-1 signature domain includes the following amino acid motif: L-Xaa₁-S-V-Xaa₂-Xaa₃-P-Xaa₄-Xaa₅-Xaaₙ-I, wherein Xaa represents any amino acid, and n is about 5-25 amino acid residues, more preferably about 6-18 amino acid residues, and more preferably about 6-15 amino acid residues (SEQ ID NO:108). Preferably, the IL-1 signature domain includes the following amino acid sequence: L-Xaa₁-S-V-Xaa₂-Xaa₃-P-Xaa₄-Xaa₅-Xaaₙ-I, wherein Xaa₁ is either threonine (T) or glutamic acid (E); Xaa₂ is either alanine (A) or glutamic acid (E); and Xaa₅ is either tryptophan (W) or leucine (L) (SEQ ID NO:111). In another embodiment, an IL-1 signature domain includes the following amino acid sequence motif: F-Xaa₁-S-A-Xaa₂-Xaa₃-P-Xaa₄-Xaa₅-Xaaₙ-L, wherein Xaa represents any amino acid, and n is about 5-25 amino acid residues, more preferably about 6-18 amino acid residues, and more preferably about 6-15 amino acid residues (SEQ ID NO:94). Preferably, the IL-1 signature domain includes the following amino acid sequence: F-Xaa₁-S-A-Xaa₂-Xaa₃-P-Xaa₄-Xaa₅-Xaaₙ-L, wherein Xaa₁ is either threonine (T) or glutamic acid (E); Xaa₂ is either alanine (A) or glutamic acid (E); and Xaa₅ is either tryptophan (W) or leucine (L) (SEQ ID NO:95). In yet another embodiment, the IL-1 signature domain is at least about 10-30 amino acid residues in length, preferably 15-25 amino acid residues in length, preferably 17-24 amino acid residues, 19-23 amino acid residues or more preferably 21-22 amino acid residues in length and has at least about 30-60% identity, preferably at least about 35-55% identity, more preferably at least about 40-50% identity, and more preferably at least about 46-49% identity with an IL-1 signature domain of a protein of the invention having an amino acid sequence as set forth in SEQ ID NO:90 (e.g., amino acid residues 58-80), SEQ ID NO:102 (e.g., amino acid residues 130-151), SEQ ID NO:105 (e.g., amino acid residues 169-190), or SEQ ID NO:113 (e.g., amino acid residues 120-142).

[0352] In a preferred embodiment, a protein of the invention, preferably a SPOIL protein, contains an IL-1 signature domain of SEQ ID NO:90 (e.g., amino acid residues 58-80), SEQ ID NO:102 (e.g., amino acid residues 130-151), SEQ ID NO:105 (e.g., amino acid residues 169-190), or SEQ ID NO:113 (e.g., amino acid residues 120-142).

[0353] In another embodiment of the invention, a SPOIL protein is identified based on the presence of at least one “SPOIL signature motif” in the protein or corresponding nucleic acid molecule. As used herein, the term “SPOIL signature motif” includes an amino acid sequence which contains amino acid residues that are conserved among SPOIL family members. In one embodiment, a SPOIL signature motif, referred to herein as a “short SPOIL signature motif”, includes an amino acid sequence at least about 35-55 amino acid residues, preferably about 38-50 amino acid residues, more preferably about 40-48 amino acid residues, more preferably 42-46 amino acid residues, and more preferably 44 amino acid residues in length and having the following amino acid sequence: Q-Xaa₁-Xaa₂-E-Xaa₃-Xaa₄-1-M-Xaa₅-Xaa₆-Y-Xaa₇-Xaa₈-Xaa₉-E-P-V-K-Xaa₁₀-Xaa₁₁-L-F-Y-Xaa₁₂-Xaa₁₃-K-Xaa₁₄-G-Xaa₁₅-T-S-T-Xaa₁₆-E-S-Xaa₁₇-A-F-P-Xaa₁₈-W-F-1-A, wherein Xaa₁₋₁₈ is any amino acid (set forth in SEQ ID NO:109). Accordingly, preferred proteins include the conserved amino acid residues of the above-recited SPOIL signature motif. Proteins including at least 30, 31, 32, 33, 34, 35, 36, 37, 38, 39, 40, 41, 42, or 43 conserved amino acid residues of the above-recited SPOIL signature motif are also considered to be within the scope of the present invention.

[0354] In another embodiment, a SPOIL signature motif, referred to herein as a “long SPOIL signature motif” includes an amino acid sequence of at least about 58-78 amino acid residues, preferably about 61-74 amino acid residues, more preferably about 63-72 amino acid residues, more preferably 65-70 amino acid residues, and more preferably 67-68 amino acid residues in length and having the following amino acid sequence: Q-Xaa₁-Xaa₂-E-Xaa₃-Xaa₄-1-M-Xaa₅-Xaa₆-Y-Xaa₇-Xaa₈-Xaa₉-E-P-V-K-Xaa₁₀-Xaa₁₁-L-F-Y-Xaa₁₂-Xaa₁₃-K-Xaa₁₄-G-Xaa₁₅-T-S-T-Xaa₁₆-E-S-Xaa₁₇-A-F-P-Xaa₁₈-W-F-1-A-Xaa₁₉-Xaa₂₀-Xaa₂₁-Xaa₂₂-Xaa₂₃-Xaa₂₄-Xaa₂₅-P-Xaa₂₆-1-L-T-Xaa₂₇-E-L-G-Xaa₂₈-Xaa₂₉-Xaa₃₀-Xaa₃₁-T-Xaa₃₂-F-E, wherein Xaa_{1-24 and 26-32} is any amino acid Xaa₂₅ is no amino acid or any amino acid (set forth in SEQ ID NO:110). A preferred protein includes the conserved amino acid residues of the above-recited SPOIL signature motif. Proteins including at least 56, 57, 58, 59, 60, 61, 62, 63, 64, 65, or 66 conserved amino acid residues of the above-recited SPOIL signature motif are also considered to be within the scope of the present invention.

[0355] Table III depicts the conserved amino acid residues of the SPOIL signature motifs set forth in SEQ ID NO:109 and SEQ ID NO:110. The conserved amino acid residues are numbered according to their position in the SPOIL signature motif as well as by their relative amino acid position in each of murine SPOIL-I, murine SPOIL-II, human SPOIL-I and human SPOIL-II. As used herein, the amino acid residues in each of the SPOIL proteins “correspond to” the relative amino acid residues in a SPOIL signature motif.

TABLE III

| | corre- | corre- | corre- | corre- |
|---|---|---|---|---|
| Residue in | sponding | sponding | sponding | sponding |
| SPOIL | residue in | residue in | residue in | residue in |
| signature motif | muSPOIL-I | muSPOIL-II | huSPOIL-I | huSPOIL-II |
| Gln1 | Gln26 | Gln88 | Gln98 | Gln137 |
| Glu4 | Glu29 | Glu91 | Glu101 | Glu140 |
| Ile7 | Ile32 | Ile94 | Ile104 | Ile143 |
| Met8 | Met33 | Met95 | Met105 | Met144 |
| Tyr11 | Tyr36 | Tyr98 | Tyr108 | Tyr147 |
| Glu15 | Glu40 | Glu102 | Glu112 | Glu151 |
| Pro16 | Pro41 | Pro103 | Pro113 | Pro152 |
| Val17 | Val42 | Val104 | Val114 | Val153 |
| Lys18 | Lys43 | Lys105 | Lys115 | Lys154 |
| Leu21 | Leu46 | Leu108 | Leu118 | Leu157 |
| Phe22 | Phe47 | Phe109 | Phe119 | Phe158 |
| Tyr23 | Tyr48 | Tyr110 | Tyr120 | Tyr159 |
| Lys26 | Lys51 | Lys113 | Lys123 | Lys162 |
| Gly28 | Gly53 | Gly115 | Gly125 | Gly164 |
| Thr30 | Thr55 | Thr117 | Thr127 | Thr166 |
| Ser31 | Ser56 | Ser118 | Ser128 | Ser167 |
| Thr32 | Thr57 | Thr119 | Thr129 | Thr168 |
| Glu34 | Glu59 | Glu121 | Glu131 | Glu170 |
| Ser35 | Ser60 | Ser122 | Ser132 | Ser171 |
| Ala37 | Ala62 | Ala124 | Ala134 | Ala173 |
| Phe38 | Phe63 | Phe125 | Phe135 | Phe174 |
| Pro39 | Pro64 | Pro126 | Pro136 | Pro175 |
| Trp41 | Trp66 | Trp128 | Trp138 | Trp177 |
| Phe42 | Phe67 | Phe129 | Phe139 | Phe178 |
| Ile43 | Ile68 | Ile130 | Ile140 | Ile179 |
| Ala44 | Ala69 | Ala131 | Ala141 | Ala180 |
| Pro51 | Pro77 | Pro139 | Pro148 | Pro187 |
| Ile53 | Ile79 | Ile141 | Ile150 | Ile189 |
| Leu54 | Leu80 | Leu142 | Leu151 | Leu190 |
| Thr55 | Thr81 | Thr143 | Thr152 | Thr191 |
| Glu57 | Glu83 | Glu145 | Glu154 | Glu193 |
| Leu58 | Leu84 | Leu146 | Leu155 | Leu194 |
| Gly59 | Gly85 | Gly147 | Gly156 | Gly195 |
| Thr64 | Thr90 | Thr152 | Thr161 | Thr200 |
| Phe66 | Phe92 | Phe154 | Phe163 | Phe202 |
| Glu67 | Glu93 | Glu155 | Glu164 | Glu203 |

[0356] Another embodiment of the invention features proteins having a “SPOIL unique domain”. As used herein, a “SPOIL unique domain” is at least about 134-150 amino acid residues in length and has at least about 45-50% identity with amino acid residues 66-206 of SEQ ID NO:105. In another embodiment, the SPOIL unique domain is at least about 136-148 amino acid residues, preferably about 138-146 amino acid residues, more preferably 140-144 amino acid residues, and more preferably 141, 142, or 143 amino acid residues in length and has at least about 55-60%, preferably about 65-70%, and more preferably about 75%, 80%, 85%, 90%, 95%, 98%, 99%, or 100% identity with amino acid residues 66-206 of SEQ ID NO:105. In a preferred embodiment, the SPOIL unique domain is from about amino acid residues 66-206 of human SPOIL-II shown in SEQ ID NO:105. In another preferred embodiment, the SPOIL unique domain is from about amino acid residues 27-167 of human SPOIL-I shown in SEQ ID NO:102. In yet another preferred embodiment, the SPOIL unique domain is from about amino acid residues 17-158 of murine SPOIL-II shown in SEQ ID NO:113.

[0357] Another embodiment of the invention features proteins having a “SPOIL C-terminal unique domain”. As used herein, a “SPOIL C-terminal unique domain” is at least about 58-78 amino acid residues in length and has at least about 45-50% identity with amino acid residues 137-203 of SEQ ID NO:105. In another embodiment, the SPOIL C-terminal unique domain is at least about 61-74 amino acid residues, preferably about 63-72 amino acid residues, more preferably 65-70 amino acid residues, and more preferably 67-68 amino acid residues in length and has about 55-60%, preferably about 65-70%, and more preferably about 75%, 80%, 85%, 90%, 95%, 98%, 99%, or 100% identity with amino acid residues 137-203 of SEQ ID NO:105. In one embodiment, the C-terminal unique domain is located within the C-terminal 70 amino acids of the full-length protein, preferably within the C-terminal 80 amino acid residues of the protein, more preferably within the C-terminal 90 amino acid residues of the protein, and even more preferably within the C-terminal 100, 120, 140, 160 or 180 amino acid residues of the full-length protein. In a preferred embodiment, the SPOIL C-terminal unique domain is from about amino acid residues 137-203 of human SPOIL-II shown in SEQ ID NO:105. In another preferred embodiment, the SPOIL C-terminal unique domain is from about amino acid residues 98-164 of human SPOIL-I shown in SEQ ID NO:102. In another preferred embodiment, the SPOIL C-terminal unique domain is from about amino acid residues 26-93 of murine SPOIL-I shown in SEQ ID NO:90. In yet another preferred embodiment, the SPOIL C-terminal unique domain is from about amino acid residues 88-155 of murine SPOIL-II shown in SEQ ID NO:113.

[0358] Another embodiment of the invention features a protein of the invention, preferably a SPOIL protein, which contain a signal sequence. As used herein, a “signal sequence” refers to a peptide containing about 17 amino acids which occurs at the N-terminus of secretory proteins and which contains a large number of hydrophobic amino acid residues. For example, a signal sequence contains at least about 13-22 amino acid residues, preferably about 15-20 amino acid residues, more preferably about 16-19 amino acid residues, and more preferably about 17 amino acid residues, and has at least about 35-65%, preferably about 38-50%, and more preferably about 40-45% hydrophobic amino acid residues (e.g., Valine, Leucine, Isoleucine or Phenylalanine). Such a “signal sequence”, also referred to in the art as a “signal peptide”, serves to direct a protein containing such a sequence to a lipid bilayer. For example, in one embodiment, a SPOIL protein contains a signal sequence containing about amino acids 1-17 of SEQ ID NO:90.

[0359] In yet another embodiment, a protein of the invention, preferably a SPOIL protein, encodes a mature protein. As used herein, the term “mature protein” refers to a protein of the invention, preferably a SPOIL protein, from which the signal peptide has been cleaved. In an exemplary embodiment, a mature SPOIL protein contains amino acid residues 1 to 81 of SEQ ID NO:93. In a preferred embodiment, a SPOIL protein is a mature SPOIL protein which includes an IL-1 signature domain. In yet another embodiment, a SPOIL protein is a mature protein which includes a SPOIL signature motif and/or a SPOIL C-terminal unique domain.

[0360] Preferred proteins of the present invention, preferably SPOIL proteins, have an amino acid sequence sufficiently homologous to the amino acid sequence of SEQ ID NO:90; SEQ ID NO:93; SEQ ID NO:102, SEQ ID NO:105, SEQ ID NO:113, the amino acid sequence encoded by the DNA insert of the plasmid deposited with ATCC as Accession Number 98883, or the amino acid sequence encoded by the DNA insert of the plasmid deposited with ATCC as Accession Number 98984. As used herein, the term “sufficiently homologous” refers to a first amino acid or nucleotide sequence which contains a sufficient or minimum number of identical or equivalent (e.g., an amino acid residue which has a similar side chain) amino acid residues or nucleotides to a second amino acid or nucleotide sequence such that the first and second amino acid or nucleotide sequences share common structural domains or motifs and/or a common functional activity. For example, amino acid or nucleotide sequences which share common structural domains have at least 45% or 50% identity, preferably 60% identity, more preferably 70%-80%, and even more preferably 90-95% identity across the amino acid sequences of the domains and contain at least one and preferably two structural domains or motifs, are defined herein as sufficiently homologous. Furthermore, amino acid or nucleotide sequences which share at least 45% or 50%, preferably 60%, more preferably 70-80%, or 90-95% identity and share a common functional activity are defined herein as sufficiently homologous.

[0361] As used interchangeably herein a “SPOIL activity”, “biological activity of SPOIL” or “functional activity of SPOIL”, refers to an activity exerted by a SPOIL protein, polypeptide or nucleic acid molecule on a SPOIL responsive cell as determined in vivo, or in vitro, according to standard techniques. In one embodiment, a SPOIL activity is a direct activity, such as an association with a target protein, preferably a SPOIL target molecule (e.g., a cell-surface or internalized IL-1 or SPOIL receptor). In another embodiment, a SPOIL activity is an indirect activity, such as inhibiting the synthesis or activity of a second protein (e.g., a protein of a signal pathway). In a preferred embodiment, a SPOIL activity is at least one or more of the following activities: (i) interaction of a SPOIL protein in the extracellular milieu with a protein molecule on the surface of the same cell which secreted the SPOIL protein molecule (e.g., a SPOIL receptor or IL-1 receptor); (ii) interaction of a SPOIL protein in the extracellular milieu with a protein molecule on the surface of a different cell from that which secreted the SPOIL protein molecule (e.g., a SPOIL receptor or IL-1 receptor); (iii) complex formation between a SPOIL protein and a cell-surface receptor; (iv) interaction of a SPOIL protein with a target molecule in the extracellular milieu (e.g., a soluble target molecule); (v) interaction of the SPOIL protein with an intracellular target molecule (e.g., interaction with an internalized or endocytosed receptor or ligand-coupled receptor); and (vi) complex formation with at least one, preferably two or more, intracellular target molecules.

[0362] In yet another preferred embodiment, a SPOIL activity is at least one or more of the following activities: (1) modulating, for example, antagonizing a signal transduction pathway (e.g., an IL-1-dependent or SPOIL-dependent pathway; (2) modulating cytokine production and/or secretion (e.g., production and/or secretion of a proinflammatory cytokine); (3) modulating lymphokine production and/or secretion; (4) modulating production of adhesion molecules and/or cellular adhesion; (5) modulating expression or activity of nuclear transcription factors; (6) modulating secretion of IL-1; (7) competing with IL-1 to bind an IL-1 receptor; (8) competing with a SPOIL protein (e.g., a SPOIL-I or SPOIL-II family member) to bind a SPOIL receptor; (9) modulating nuclear translocation of internalized IL-1 or SPOIL receptor or ligand-complexed receptor; (10) modulating cell proliferation, development or differentiation, for example, IL-1-stimulated or a SPOIL protein-stimulated proliferation, development or differentiation (e.g., of an epithelial cell, for example, a squamous epithelial cell of the esophagus, or of a skin cell, e.g., a keratinocyte); (11) modulating cell proliferation, development or differentiation of an osteogenic cell (e.g., of an osteoclast precursor cell, osteoclast and/or osteoblast); (12) modulating function of an osteogenic cell (e.g., osteoblast and/or osteoclast function); (13) modulating bone formation, bone metabolism and/or bone homeostasis (e.g., inhibiting bone resorption); (14) modulating cellular immune responses; (15) modulating cytokine-mediated proinflammatory actions (e.g., inhibiting acute phase protein synthesis by hepatocytes, fever, and/or prostaglandin synthesis, for example PGE₂ synthesis); and (16) promoting and/or potentiating wound healing.

[0363] The present invention is based, at least in part, on the discovery of a family of SPOIL proteins (e.g., SPOIL-I and SPOIL-II proteins) sharing certain conserved structural features (e.g., a SPOIL signature motif, an IL-1 signature domain, a SPOIL C-terminal unique domain). Moreover, it has been discovered that SPOIL proteins exist as multiple isoforms, presumably due to alternative splicing of one or more common genes. For example, SPOIL proteins having internal inserted amino acid segments have been identified (e.g., human SPOIL-II includes a segment of at least 40 amino acid residues not appearing in human SPOIL-I). SPOIL proteins have also been identified which may function as both secreted and intracellular molecules (e.g., murine SPOIL-I has a signal sequence which is not found in murine SPOIL-II). Therefore, additional SPOIL family members can be identified based on the nucleotide and amino acid sequence information provided herein which, e.g., via alternative splicing of genomic SPOIL sequences, have unique combinations of the structural features defined herein. For example, secreted isoforms of human SPOIL can be identified which include all, or a portion of the amino acid sequences set forth as SEQ ID NOs:102 and 105.

[0364] Moreover, SPOIL family members can be identified based on unique nucleotide and/or amino acid sequences found in one SPOIL family member as compared to a second SPOIL family member. For example, a comparison between the nucleotide sequences of murine SPOIL-I (SEQ ID NO:89) and murine SPOIL-II (SEQ ID NO:112) reveals that murine SPOIL-II includes a fragment from nucleotides 225 to 364 that is absent from murine SPOIL-I (SEQ ID NO:89). Moreover, a comparison of the amino acid sequences of murine SPOIL-I (SEQ ID NO:90) and murine SPOIL-II (SEQ ID NO:113) reveals that murine SPOIL-II includes a fragment from amino acids 1 to 90 that is absent from murine SPOIL-I. Accordingly, one embodiment of the present invention includes an isolated nucleic acid molecule including nucleotides 225 to 364 of SEQ ID NO:112. In another embodiment, an isolated nucleic acid molecule of the present invention includes at least 30 contiguous nucleotides of SEQ ID NO:112 from nucleotides 225 to 364. In another embodiment, an isolated nucleic acid molecule of the present invention includes at least 20-140, 30-130, 40-120, 50-110, 60-100, 70, 80, or 90 contiguous nucleotides of SEQ ID NO:112 from nucleotides 225 to 364. In yet another embodiment, an isolated nucleic acid molecule of the present invention has at least about 50% identity to nucleotides 225 to 364 of SEQ ID NO:112. In yet another embodiment, an isolated nucleic acid molecule has at least 50% identity to at least 30 contiguous nucleotides of SEQ ID NO:112 from nucleotides 224 to 364. In yet another embodiment, an isolated nucleic acid molecule of the invention hybridizes under stringent conditions to nucleotides 225 to 364 of SEQ ID NO:112. In yet another embodiment, an isolated nucleic acid molecule hybridizes under stringent conditions to at least 30 contiguous nucleotides of SEQ ID NO:112 from nucleotides 225 to 364.

[0365] Another embodiment of the present invention pertains to a polypeptide including amino acids 1 to 90 of SEQ ID NO:113. In yet another embodiment, the polypeptide includes at least 30 contiguous amino acids of SEQ ID NO:113 from amino acids 1 to 90 of SEQ ID NO:113. In yet another embodiment, the polypeptide includes at least 10-90, 20-80, 30-70, 40, 50 or 60 contiguous amino acids of SEQ ID NO:113 from amino acids 1 to 90. Yet another embodiment of the invention pertains to a polypeptide having at least 50% identity to amino acids 1 to 90 of SEQ ID NO:113. In yet another embodiment, the polypeptide has at least 50% identity to at least 10-90, 20-80, 30-70, 40, 50 or 60 contiguous amino acids of SEQ ID NO:113 from amino acids 1 to 90. Yet another embodiment of the present invention features isolated nucleic acid molecules encoding any of the polypeptides described herein.

[0366] Likewise, a comparison between the nucleic acid sequences of human SPOIL-I (SEQ ID NO:101) and human SPOIL-II (SEQ ID NO:104) reveals that human SPOIL-II includes a fragment from nucleotides 153 to 269 that is absent from human SPOIL-I (SEQ ID NO:101). Moreover, a comparison of the amino acid sequences of human SPOIL-I (SEQ ID NO:102) and human SPOIL-II (SEQ ID NO:105) reveals that human SPOIL-II includes a fragment from amino acids 19 to 58 that is absent from human SPOIL-I. Accordingly, one embodiment of the present invention includes an isolated nucleic acid molecule including nucleotides 153 to 269 of SEQ ID NO:112. In another embodiment, an isolated nucleic acid molecule of the present invention includes at least 30 contiguous nucleotides of SEQ ID NO:112 from nucleotides 153 to 269. In another embodiment, an isolated nucleic acid molecule of the present invention includes at least 20-140, 30-130, 40-120, 50-110, 60-100, 70, 80, or 90 contiguous nucleotides of SEQ ID NO:104 from nucleotides 153 to 269. In yet another embodiment, an isolated nucleic acid molecule of the present invention has at least about 50% identity to nucleotides 153 to 269 of SEQ ID NO:104. In yet another embodiment, an isolated nucleic acid molecule has at least 50% identity to at least 30 contiguous nucleotides of SEQ ID NO:104 from nucleotides 224 to 364. In yet another embodiment, an isolated nucleic acid molecule of the invention hybridizes under stringent conditions to nucleotides 153 to 269 of SEQ ID NO:104. In yet another embodiment, an isolated nucleic acid molecule hybridizes under stringent conditions to at least 30 contiguous nucleotides of SEQ ID NO:104 from nucleotides 153 to 269.

[0367] Another embodiment of the present invention includes a polypeptide including amino acids 19 to 58 of SEQ ID NO:105. In yet another embodiment, the invention features a polypeptide which includes at least 30 contiguous amino acids of SEQ ID NO:105 from amino acids 19 to 58 of SEQ ID NO:105. In yet another embodiment, the polypeptide includes at least 10-90, 20-80, 30-70, 40, 50 or 60 contiguous amino acids of SEQ ID NO:105 from amino acids 19 to 58. In yet another embodiment, the polypeptide has at least 50% identity to amino acids 19 to 58 of SEQ ID NO:105. In yet another embodiment, the polypeptide has at least 50% identity to at least 10-90, 20-80, 30-70, 40, 50 or 60 contiguous amino acids of SEQ ID NO:105 from amino acids 19 to 58. Yet another embodiment of the present invention features isolated nucleic acid molecules encoding any of the polypeptides described herein.

[0368] Given the existence of both secreted and intracellular SPOIL molecules (e.g., SPOIL-I and II isoforms) described herein, it will be appreciated that the SPOIL molecules of the present invention and modulators of SPOIL proteins are useful, for example, in regulating cellular responses triggered by extracellular events (e.g., by interaction of, for example, a cytokine (e.g., IL-1) or a SPOIL protein with a cell surface receptor. For example, it is known that unbalanced production of IL-1 is associated with the pathogenesis of various inflammatory diseases. Accordingly, SPOIL proteins and/or SPOIL modulators may be useful as therapeutic agents in achieving homeostasis and ameliorating such imbalances.

[0369] Likewise, it will be appreciated that the SPOIL molecules of the present invention and modulators of SPOIL proteins are useful in regulating cytokine (e.g., IL-1) and/or SPOIL protein dependent intracellular responses (e.g., acting as intracellular antagonists or agonists). For example, it is known that cytokines (e.g., IL-1) are not secreted from certain cell types, for example, skin cells, e.g., keratinocytes, and accordingly, there exist a discreet subset of intracellular cytokine-dependent responses and a corresponding set of intracellular SPOIL protein-dependent activities.

[0370] Moreover, SPOIL molecules of the present invention have been found to be constitutively expressed, for example, in epithelial cells, in particular in the squamous epithelium of the esophagus and the epithelial lining of the mouth (e.g., murine SPOIL-II was isolated from an esophageal cDNA library). In addition, expression of SPOIL molecules can also be induced in certain cell types and tissues. For example, the human SPOILs were isolated from a stimulated keratinocyte library and human SPOIL-I was expressed in keratinocytes induced with PMA, ionomycin, TNF and cyclohexamide. In addition, human SPOIL-I was observed in monocytic cells stimulated with LPS and expression of SPOIL-I was induced in the kidneys of lippopolysaccharide (LPS)-injected mice. Furthermore, expression has been correlated with certain proliferative disorders. For example, human SPOIL-I was found to be expressed on human esophageal tumor samples and overexpressed in squamous cell carcinoma of the esophagus. It has further been demonstrated that a secreted form of SPOIL (e.g., murine SPOIL-I), when expressed in vivo, caused impairment of osteoclast differentiation and/or function as well as evidence of impaired bone resorption (see EXAMPLE 25).

[0371] Accordingly, in another embodiment of the invention, a SPOIL molecule or preferably, a SPOIL modulator, is useful for regulating, preventing and/or treating at least one or more of the following diseases or disorders: (1) inflammatory diseases and disorders including, but not limited to, inflammation, septic shock, arthritis, intercolitis, and pneumonitis; (2) epithelial cell and/or skin diseases and disorders including, but not limited to proliferative disorders (e.g., skin cancers including, but not limited to, melanoma, and Kaposi's sarcoma, and other epithelial cancers including squamous cell carcinoma, esophageal cancer and cancer of the mouth and/or throat); (3) bone-related and/or bone resorption disorders including, but not limited to osteoporosis, Paget's disease, osteoarthritis, degenerative arthritis, osteogenesis imperfecta, fibrous displasia, hypophosphatasia, bone sarcoma, myeloma bone disorder (e.g., osteolytic bone lesions) and hypercalcemia; and (4) diseases and disorders that involve the bowel and are characterized by the production of inflammation and at times, ulceration in the small or large bowel, including but not limited to, inflammatory bowl disease (IBD) (e.g., Crohn's disease, irritable bowel syndrome (IBS) and ulcerative colitis). Moreover, it will be appreciated that the SPOIL molecules and SPOIL modulators are useful for the following purposes: (1) regulation of bone mass (e.g., increase bone mass and/or inhibit bone loss); (2) management of bone fragility (e.g., decrease bone fragility); and (3) prevention and/or treatment of bone pain, bone deformities, and/or bone fractures.

[0372] Another embodiment of the invention features isolated SPOIL proteins and polypeptides having a conserved SPOIL structural feature and a SPOIL activity, as defined herein. Preferred SPOIL proteins have an IL-1 signature domain and a SPOIL activity. In one embodiment, the SPOIL protein has a signal peptide, an IL-1 signature domain, and a SPOIL activity. In another preferred embodiment, the SPOIL protein has a signal peptide, an IL-1 signature domain, a SPOIL activity, and an amino acid sequence sufficiently homologous to an amino acid sequence of SEQ ID NO:90; SEQ ID NO:102, SEQ ID NO:105, SEQ ID NO:113, the amino acid sequence encoded by the DNA insert of the plasmid deposited with ATCC as Accession Number 98883, or the amino acid sequence encoded by the DNA insert of the plasmid deposited with ATCC as Accession Number 98984.

[0373] Another embodiment of the invention features isolated SPOIL proteins and polypeptides having a SPOIL activity, a SPOIL signature motif (short or long form) and/or SPOIL unique domain. In another embodiment, the SPOIL protein has a SPOIL activity, a SPOIL signature motif (short or long form) and/or SPOIL C-terminal unique domain. In another preferred embodiment, the SPOIL protein has a SPOIL activity, a SPOIL signature motif (short or long form) and/or SPOIL C-terminal unique domain, and an amino acid sequence sufficiently homologous to an amino acid sequence of SEQ ID NO:90; SEQ ID NO:102, SEQ ID NO:105, SEQ ID NO:113, the amino acid sequence encoded by the DNA insert of the plasmid deposited with ATCC as Accession Number 98883, or the amino acid sequence encoded by the DNA insert of the plasmid deposited with ATCC as Accession Number 98984. The above-described SPOIL proteins can further include an IL-1 signature domain as described herein.

[0374] In a particularly preferred embodiment, the SPOIL protein and nucleic acid molecules of the present invention are human SPOIL molecules. A nucleotide sequence of the isolated human SPOIL-I cDNA and the predicted amino acid sequence of the human SPOIL-I protein are shown in SEQ ID NOs:101 and 102, respectively. In addition, the nucleotide sequence corresponding to the coding region of the human SPOIL-I cDNA (nucleotides 124 to 630) is represented as SEQ ID NO:103.

[0375] The human SPOIL-I cDNA, which is approximately 1291 nucleotides in length, encodes a protein which is approximately 169 amino acid residues in length. A plasmid containing the full length nucleotide sequence encoding human SPOIL-I (clone designation Epjthkf 035f11) was deposited under the provisions of the Budapest Treaty with the American Type Culture Collection (ATCC), presently in Manassas, Va., on Sep. 11, 1998 and assigned Accession Number 98883. The human SPOIL-I protein contains an IL-1 signature domain, which can be found, for example, from about amino acids 130 to 151 of SEQ ID NO:102 (Leu130 to Leu151 of the human SPOIL-I amino acid sequence). The human SPOIL-I protein further contains a SPOIL signature motif, which can be found, for example, from about amino acids 98-141 (short) of from about 98-164 (long) of SEQ ID NO:102 (Gln98 to Ala141 or Gln98 to Glu164 of the human SPOIL-I amino acid sequence). A SPOIL C-terminal unique domain can be found in the human SPOIL-I protein, for example, from about amino acid residues 98-164 of SEQ ID NO:102 (Gln98 to Glu164 of the human SPOIL-I amino acid sequence).

[0376] A nucleotide sequence of the isolated human SPOIL-II cDNA and the predicted amino acid sequence of the human SPOIL-II protein are shown in SEQ ID NOs:106 and 107, respectively. In addition, the nucleotide sequence corresponding to the coding region of the human SPOIL-II cDNA (nucleotides 98-721) is represented as SEQ ID NO:106.

[0377] The human SPOIL-II cDNA, which is approximately 1377 nucleotides in length, encodes a protein which is approximately 208 amino acid residues in length. A plasmid containing the full length nucleotide sequence encoding human SPOIL-II (clone designation Epjthkf 074e01) was deposited under the provisions of the Budapest Treaty with the American Type Culture Collection (ATCC), presently in Manassas, Va., on Nov. 11, 1998 and assigned Accession Number 98984. The human SPOIL-II protein contains an IL-1 signature domain, which can be found, for example, from about amino acids 169-190 of SEQ ID NO:102 (Leu169 to Leu190 of the human SPOIL-II amino acid sequence). The human SPOIL-II protein further contains a SPOIL signature motif, which can be found, for example, from about amino acids 137-180 (short) of from about 137-203 (long) of SEQ ID NO:105 (Gln137 to Ala180 or Gln137 to Glu203 of the human SPOIL-II amino acid sequence). A SPOIL C-terminal unique domain can be found in the human SPOIL-II protein, for example, from about amino acid residues 137-203 of SEQ ID NO:105 (Gln137 to Glu203 of the human SPOIL-II amino acid sequence), having 100% identity to the SPOIL C-terminal unique domain of human SPOIL-I.

[0378] In another embodiment, the SPOIL protein and nucleic acid molecules of the present invention are murine SPOIL molecules. A nucleotide sequence of the isolated murine SPOIL-I cDNA and the predicted amino acid sequence of the murine SPOIL-I protein are shown in SEQ ID NOs:89 and 90, respectively. In addition, the nucleotide sequences corresponding to the coding region of the murine SPOIL-I cDNA (nucleotides 135-428) and the SPOIL-I cDNA encoding the mature SPOIL-I protein are represented as SEQ ID NO:91 and SEQ ID NO:92, respectively.

[0379] The murine SPOIL-I cDNA (set forth in SEQ ID NO:89), which is approximately 746 nucleotides in length, encodes a protein having a molecular weight of approximately 10.96 kD (with signal sequence) and 9.1 kD (without signal sequence) and which is approximately 98 amino acid residues in length (SEQ ID NO:90). The murine SPOIL-I protein contains an IL-1 signature domain as defined herein, which can be found, for example, from about amino acids 58 to 80 of SEQ ID NO:90 and, for example, from about amino acids 41-63 of SEQ ID NO:93. The murine SPOIL-I protein further contains a SPOIL signature motif, which can be found, for example, from about amino acids 26-69 (short) of from about 26-93 (long) of SEQ ID NO:90 (Gln26 to Ala69 or Gln26 to Glu93 of the murine SPOIL-I amino acid sequence). A SPOIL C-terminal unique domain can be found in the murine SPOIL-I protein, for example, from about amino acid residues 26-93 of SEQ ID NO:105 (Gln26 to Glu93 of the murine SPOIL-I amino acid sequence), having 52.2% identity to the SPOIL C-terminal unique domain of human SPOIL-I. (Comparison can be made using, for example, the Lipman-Pearson Algorithm (Lipman and Pearson (1985) Science 227:1435-1441, with a K-tuple of 2, a Gap Penalty of 4, and a Gap Weight Penalty of 12. In addition, the murine SPOIL-I protein can contain a signal sequence. A signal sequence can be found at least, for example, from about amino acids 1-17 of SEQ ID NO:90. The prediction of such a signal peptide can be made, for example, utilizing the computer algorithm SignalP (Henrik, et al. (1997) Protein Engineering 10:1-6).

[0380] The entire amino acid sequence of SEQ ID NO:90 was subcloned into retroviral vector MSCVneo (Hawley, et al. (1994) Gene Therapy 1:136-138) and used for retroviral delivery. Bone marrow infected with the retroviral vector expressing murine SPOIL-I was transplanted into irradiated mice recipients. Bones removed from these mouse recipients, histologically, appeared thicker than the bones of control mice. In addition, spleen cells (i.e., a source of osteoclast progenitors) which were removed from mice recipients and were cultured on a bone marrow cell line, demonstrated reduced osteoclast production than the spleen cells of control mice. These experiments are discussed in further detail herein.

[0381] According to in situ analysis of mouse tissues, in the tissues tested, SPOIL-I mRNA transcript is expressed almost exclusively in the squamous cell epithelium of the esophagus and in the epithelial lining of the mouth. Northern blot analysis of human tissues confirms this pattern of SPOIL expression with transcripts being detected in esophagus with expression also likely in the trachea, among the tissues tested. In addition, SPOIL is also present on human esophageal tumor samples and overexpressed in moderately differentiated squamous cell carcinoma of the esophagus.

[0382] A multiple sequence alignment of the amino acid sequences of murine SPOIL-I with murine IL-1ra (Swiss-Prot™ Accession No. P25085) (SEQ ID NO:98), as well as murine IL-1α (Swiss-Prot™ Accession No. P01582) (SEQ ID NO:99) and murine IL-1β (Swiss-Prot™ Accession No. P10749) (SEQ ID NO:100) was generated using MegAlign™ sequence alignment software (refer to FIG. 4).

[0383] A nucleotide sequence of the isolated murine SPOIL-II cDNA and the predicted amino acid sequence of the murine SPOIL-II protein are shown in SEQ ID NOs:112 and 113, respectively. In addition, the nucleotide sequences corresponding to the coding region of the murine SPOIL-II cDNA (nucleotides 96-575) is represented as SEQ ID NO:114.

[0384] The murine SPOIL-II cDNA (set forth in SEQ ID NO:112), which is approximately 838 nucleotides in length, encodes a protein which is approximately 160 amino acid residues in length (SEQ ID NO:113). The murine SPOIL-II protein contains an IL-1 signature domain as defined herein, which can be found, for example, from about amino acids 120 to 142 of SEQ ID NO:113. The murine SPOIL-II protein further contains a SPOIL signature motif, which can be found, for example, from about amino acids 88-131 (short) of from about 88-155 (long) of SEQ ID NO:113 (Gln88 to Ala131 or Gln88 to Glu155 of the murine SPOIL-II amino acid sequence). A SPOIL C-terminal unique domain can be found in the murine SPOIL-II protein, for example, from about amino acid residues 88-155 of SEQ ID NO:113 (Gln88 to Glu155 of the murine SPOIL-II amino acid sequence), having 52.2% identity to the SPOIL C-terminal unique domain of human SPOIL-I.

[0385] A multiple sequence alignment of the amino acid sequences of human SPOIL-I (corresponding to amino acid residues 1-169 of SEQ ID NO:102), human SPOIL-II (corresponding to amino acid residues 1-208 of SEQ ID NO:105), murine SPOIL-I (corresponding to amino acid residues 1-98 of SEQ ID NO:90), and murine SPOIL-II (corresponding to amino acid residues 1-160 of SEQ ID NO:113) is shown in FIG. 6.

[0386] A multiple sequence alignment of the amino acid sequences of murine SPOIL-I, murine SPOIL-II, human SPOIL-I, and human SPOIL-II with murine IL-1ra (Swiss-Prot™ Accession No. P25085) (SEQ ID NO:98), as well as murine (Swiss-Prot™ Accession No. P01582) (SEQ ID NO:99) and murine IL-1β (Swiss-Prot™ Accession No. P10749) (SEQ ID NO:100) is shown in FIG. 7. (The alignments of FIGS. 4, 6, and 7 were generated using MegAlign™ sequence alignment software using the Clustal algorithm). The initial pairwise alignment parameters are set to a K-tuple of 1, a GAP penalty of 3, a window of 5, and diagonals saved set to =5. The multiple alignment parameters are set at a GAP penalty of 10, and a GAP length penalty of 10.)

### NEOKINE

[0387] Cytokines are small peptide molecules produced by a variety of cells that mediate a wide range of biological activities. Arai et al. (1990) Annu. Rev. Biochem. 59:783 and Paul and Seder (1994) Cell 76:241. Through a complex network, cytokines regulate functions including cellular growth, inflammation, immunity, differentiation and repair. Mosmann (1991) Curr. Opin. Immunol. 3:311. One superfamily of cytokines, termed the chemokine superfamily, is a large group of more than 30 small proteins, many of which play a role in the selective recruitment and activation of leukocytes during inflammation. Wells and Peitsch (1997) J. Leukoc. Biol. 61:5. The chemokine superfamily can be subdivided into two groups based on the arrangement of the first two of four conserved cysteines, which are either separated by one amino acid (CXC chemokines) or adjacent (CC chemokines). Baggiolini et al. (1995) Int. J. Immunopharmacol. 17:2. IL-8 and the other CXC chemokines act preferentially on neutrophils, while the CC chemokines (MCP-1, MCP-2, MCP-3, RANTES, MIP-1 alpha and MIP-1 beta) act on monocytes, but not neutrophils, and have additional activities toward basophil and eosinophil granulocytes, and T-lymphocytes. Baggiolini et al., supra.

[0388] The CXC chemokine family of cytokines display disparate angiogenic activity depending upon the presence or absence of the ELR motif, a structural amino acid motif previously found to be important in receptor:ligand binding on neutrophils. CXC chemokines containing the ELR motif are potent angiogenic factors, inducing both in vitro endothelial chemotaxis and in vivo corneal neovascularization. In contrast, the CXC chemokines that lack the ELR motif including, PF4, IP-10, and MIG, not only fail to induce significant in vitro endothelial cell chemotaxis or in vivo corneal neovascularization, but are found to be potent angiostatic factors in the presence of CXC chemokines containing the ELR motif. Strieter et al. (1995) Shock 4:3. The CXC cytokines have a signature pattern which spans the region that includes the four conserved cysteine residues. A CXC-signature pattern has been generated from the consensus of multiple CXC chemokines. The signature pattern has been assigned Prosite Signature PS00471.

[0389] The present invention is based on the discovery of family of molecules, referred to herein as NEOKINE protein and nucleic acid molecules. The NEOKINEs are members of the non-ELR-CXC subfamily of chemokines (a shortening of chemoattractant cytokines). The CXC-chemokines display four highly conserved cysteine amino acid residues, with the first two cysteines separated by one non-conserved amino acid residue. The cloning of the NEOKINE family of CXC chemokines revealed at least three atypical features which distinguish them from previously characterized chemokines. These are (1) the presence of approximately 5 residues between the third and fourth conserved cysteine residues which are absent from other CXC chemokines; (2) the fewest residues preceeding the predicted amino terminus of the mature form of any naturally-occurring chemokine; and (3) a general dissimilarity to all other chemokines in the region between the second and third conserved cysteines. Phylogenetic analysis of known chemokines (e.g., known CXC as well as CC chemokines) further demonstrates that NEOKINE is unique from other chemokines subfamilies identified to date although it is clearly a related chemokine.

[0390] The family of NEOKINE chemokines described herein include human, murine, rat and macaque NEOKINE-1. Upon comparison of the sequences for each species orthologue, it was noticed that the NEOKINE-1 chemokines displayed a remarkable degree of identity between orthologues. For example, human NEOKINE-1 is 92% identical at the amino acid level to murine NEOKINE-1 (as determined using a Lipman-Pearson algorithm (Lipman and Pearson (1985) Science 227:1435-1441, Ktuple=2, Gap Penalty=4, Gap Length Penalty=12).

[0391] The present invention is also based on the discovery that NEOKINE is the surrogate ligand for a previously-identified orphan receptor known in the art as RDC1. RDC1 was first identified as one of four orphan receptors cloned from a dog thyroid cDNA library based on homology to the seven-transmembrane helice-containing G-protein coupled receptors (Libert et al. (1989) Science 244:569-572). Three of these, RDC4, RDC7, and RDC8 have since been identified as 5-HT_{1D}, adenosine A₁ and adenosine A₂ receptors, respectively (Maenhaut et al. (1991) Biochem. Biophys. Res. Commun. 173:1169-1178; Libert et al. (1991) EMBO J. 10:1677-1682; and Maenhaut et al. (1991) Biochem. Biophys. Res. Commun. 180:1460-1468). A human orthologue of the fourth orphan, termed GPRN1, was subsequently cloned which was initially proposed to be the receptor for vasoactive intestinal peptide (“VIP”) (Sreedharan et al. (1991) Proc. Nat'l. Acad. Sci. USA 88:4986-4990). This finding has more recently been refuted (Nagata et al. (1992) Trends Biochem. Sci. 13:102-103; and Cook et al. (1992) FEBS Lett. 300:149-152), leaving the receptor orphaned. Recent reports have characterized the tissue expression of RDC1/GPRN1 receptor (Law and Rosenzweig (1994) Biochem. Biophys. Res. Commun. 201:458-465) and have identified and characterized a murine homologue of RDC1/GPRN1 (Heesen et al. (1998) Immunogenetics 47:364-370).

[0392] Sequence comparison of human and murine RDC1/GPRN1 reveals that these orthologues exhibit remarkable sequence identity as is the case with species orthologues of NEOKINE. Moreover, phylogenetic analysis of chemokine receptors demonstrates that RDC1/GPRN1 is a unique but distantly related member of the CXC subfamily of chemokine receptors. Given the remarkable sequence identity between species orthologues of NEOKINE and between orthologues of RDC1/GPRN1, as well as the unique positions which both NEOKINE and RDC1/GPRN1 fall on their respective phylogenetic trees, it has been determined that the NEOKINE is the surrogate ligand for the previously orphaned RDC1/GPRN1 receptor.

[0393] The term “family” when referring to the protein and nucleic acid molecules of the invention is intended to mean two or more proteins or nucleic acid molecules having a common structural domain and having sufficient amino acid or nucleotide sequence homology as defined herein. Such family members can be naturally occurring and can be from either the same or different species. For example, a family can contain a first protein of human origin, as well as other, distinct proteins of human origin or alternatively, can contain homologues of non-human origin. Members of a family may also have common functional characteristics.

[0394] In one embodiment, the NEOKINE proteins of the present invention are proteins having an amino acid sequence of about 75-125, preferably about 80-120, more preferably about 85-115, more preferably about 90-110, and even more preferably about 95-105 amino acids containing 3-7, preferably 5-6, and more preferably 4 cysteine residues which are conserved between family members. In another embodiment, a NEOKINE family member is identified based on the presence of at least one “NEOKINE CXC signature motif” in the protein or corresponding nucleic acid molecule. As used herein, the term “NEOKINE CXC signature motif” refers to a protein domain having an amino acid sequence of about 35-65, preferably about 40-60, more preferably about 45-55 amino acid residues, and even more preferably at least about 48-50 amino acids containing 3-7, preferably 5-6, and more preferably 4 cysteine residues which are conserved between family members, the first three residues of the NEOKINE CXC signature motif having the sequence C-X-C (“CXC”), wherein X is any amino acid and C is cysteine. In a preferred embodiment, a NEOKINE CXC signature motif has the pattern X (0-2)-C-X-C-X (20-24)-C-X (17-24)-C-X (0-2) (SEQ ID NO:185), wherein X is any amino acid and C is cysteine. In another preferred embodiment, a NEOKINE CXC signature motif has the pattern X (0-2)-C-X-C-X (23, 24)-C-X (20, 21)-C-X (2) (SEQ ID NO:186), wherein X is any amino acid and C is cysteine. In another preferred embodiment, a NEOKINE CXC signature motif has the pattern X (0-2)-C-X-C-X (6,7)-[LIVMFY]-X (2)-[RKSEQ]-X-[LIVM]-X (2)-[LIVM]-X (8)-C-X (4)-[LIVM] (2)-X (13,14)-C-[LIVM]-X (SEQ ID NO:187). In another preferred embodiment, a NEOKINE CXC signature motif has the pattern X (0, 1)-[RK]-C-[RK]-C-X(4)-P-X(4, 5)-[ED]-X(6)-[KR]-X(5)-C-[DE](2)-X[LIVMFY](4)-X (12,13)-H-C[LIVM]-H (SEQ ID NO:188). The motifs described herein, are described according to standard Prosite Signature designation (e.g., X (0-2) designates any amino acid, n=0-2; X (6, 7) designates any amino acid, n=6 or 7; and [LIVM] indicates any one of Leu, Ile, Val, or Met. All amino acids are described using universal single letter abbreviations according to these motifs. In a preferred embodiment, the N-terminal amino acid of the NEOKINE CXC signature motif is the N-terminal amino acid of the mature NEOKINE protein:

[0395] Accordingly, in one embodiment, a NEOKINE protein is human NEOKINE-1 which contains a NEOKINE CXC signature motif containing about amino acids 25-72 of SEQ ID NO:116 having the sequence CXC at amino acid residues 25-27, and having 4 conserved cysteine residues at the positions indicated in FIG. 8. In another embodiment, a NEOKINE protein is murine NEOKINE-1 which contains a NEOKINE CXC signature motif containing about amino acids 25-72 of SEQ ID NO:119 having the sequence CXC at amino acid residues 25-27, and having 4 conserved cysteine residues at the positions indicated in FIG. 8. In another embodiment, a NEOKINE protein is rat NEOKINE-1 which contains a NEOKINE CXC signature motif containing at least amino acids 4-51 of SEQ ID NO:122, having 4 conserved cysteine residues at the positions indicated in FIG. 8. In another embodiment, a NEOKINE protein is macaque NEOKINE-1 which contains a NEOKINE CXC signature motif containing at least amino acids 20-67 of SEQ ID NO:135, having 4 conserved cysteine residues at the positions indicated in FIG. 8.

[0396] In another embodiment of the invention, a NEOKINE protein has at least one NEOKINE CXC signature motif and a signal sequence. As used herein, a “signal sequence” refers to a peptide containing about 20 amino acids which occurs at the N-terminus of secretory and integral membrane proteins and which contains a majority of hydrophobic amino acid residues. For example, a signal sequence contains at least about 14-28 amino acid residues, preferably about 16-26 amino acid residues, more preferably about 18-24 amino acid residues, and more preferably about 20-22 amino acid residues, and has at least about 40-70%, preferably about 50-65%, and more preferably about 55-60% hydrophobic amino acid residues (e.g., Alanine, Valine, Leucine, Isoleucine, Phenylalanine, Tyrosine, Tryptophan, or Proline). Such a “signal sequence”, also referred to in the art as a “signal peptide”, serves to direct a protein containing such a sequence to a lipid bilayer. For example, in one embodiment, a NEOKINE-1 protein contains a signal sequence of about amino acids 1-22 of SEQ ID NO:116. In another embodiment, a NEOKINE-2 protein contains a signal sequence of about amino acids 1-22 of SEQ ID NO:119. In another embodiment, a NEOKINE-2 protein contains a signal sequence of about amino acids 1-17 of SEQ ID NO:135.

[0397] Accordingly, one embodiment of the invention features a NEOKINE protein having at least a NEOKINE CXC signature motif. Another embodiment features a NEOKINE protein having at least a NEOKINE CXC signature motif and a signal peptide.

[0398] Preferred NEOKINE molecules of the present invention have an amino acid sequence sufficiently homologous to the amino acid sequence of SEQ ID NO:116, SEQ ID NO:119, SEQ ID NO:122, or SEQ ID NO:125. As used herein, the term “sufficiently homologous” refers to a first amino acid or nucleotide sequence which contains a sufficient or minimum number of identical or equivalent (e.g., an amino acid residue which has a similar side chain) amino acid residues or nucleotides to a second amino acid or nucleotide sequence such that the first and second amino acid or nucleotide sequences share common structural domains and/or a common functional activity. For example, amino acid or nucleotide sequences which share common structural domains have at least about 50% homology, preferably 60% homology, more preferably 70%-80%, and even more preferably 90-95% homology across the amino acid sequences of the domains and contain at least one and preferably two structural domains, are defined herein as sufficiently homologous. Furthermore, amino acid or nucleotide sequences which share at least 50%, preferably 60%, more preferably 70-80, or 90-95% homology and share a common functional activity are defined herein as sufficiently homologous.

[0399] As used interchangeably herein, an “NEOKINE activity”, “biological activity of NEOKINE” or “functional activity of NEOKINE”, refers to an activity exerted by a NEOKINE protein, polypeptide or nucleic acid molecule on a NEOKINE responsive cell as determined in vivo, or in vitro, according to standard techniques. In one embodiment, a NEOKINE activity is a direct activity, such as an association with a NEOKINE-target molecule. As used herein, a “target molecule” or “binding partner” is a molecule with which a NEOKINE protein binds or interacts in nature, such that NEOKINE-mediated function is achieved. A NEOKINE target molecule can be a non-NEOKINE molecule or a NEOKINE protein or polypeptide of the present invention. In an exemplary embodiment, a NEOKINE target molecule is a carbohydrate molecule on the cell membrane (e.g., heparan sulfate). In another exemplary embodiment, a NEOKINE target molecule is a membrane-bound protein (e.g., a “NEOKINE receptor”).

[0400] In another embodiment, a NEOKINE target is a membrane-bound chemokine receptor. In another embodiment, a NEOKINE target is an protein molecule (e.g., a “NEOKINE binding partner”). In such an exemplary embodiment, a NEOKINE binding partner can be an non-NEOKINE protein or a second NEOKINE protein molecule of the present invention. Alternatively, a NEOKINE activity is an indirect activity, such as a cellular signaling activity mediated by interaction of the NEOKINE protein with a second protein (e.g., a NEOKINE receptor or a receptor specific for another chemokine).

[0401] In one embodiment, a NEOKINE activity is at least one or more of the following activities: (i) interaction of a NEOKINE protein with a membrane-bound NEOKINE receptor (e.g., RDC1); (ii) interaction of a NEOKINE protein with a membrane-bound chemokine receptor; (iii) indirect interaction of a NEOKINE protein with an intracellular protein via a membrane-bound NEOKINE receptor (e.g., RDC1); (iv) indirect interaction of a NEOKINE protein with an intracellular protein via a membrane-bound chemokine receptor; (v) complex formation between a soluble NEOKINE protein and a NEOKINE binding partner; (vi) inhibition of the interaction of chemokines (e.g., pro-inflammatory chemokines) by binding to their cognate receptors; (vii) inhibition of the binding of HIV to HIV co-receptors; and (vii) inhibition of the binding of HIV to HIV co-receptors wherein said binding induces subsequent infection of susceptible cells.

[0402] In another embodiment, a NEOKINE activity is at least one or more of the following activities: (1) modulation of cellular signal transduction, either in vitro or in vivo; (2) regulation of gene transcription in a cell expressing a NEOKINE receptor or a chemokine receptor; (3) regulation of gene transcription, in a cell expressing a NEOKINE receptor (e.g., RDC1) or a chemokine receptor, wherein said cell is involved in angiogenesis or inflammation; (4) regulation of angiogenesis; (5) regulation of angiogenesis, wherein said regulation comprises inhibibition of angiogenesis; (6) regulation of angiogenesis, wherein said regulation comprises maintenance of angiostasis; (7) regulation of inflammation; (8) inhibition of chemoattraction (e.g., neutrophil chemoattraction); and (9) inhibition of pro-inflammatory chemokines by binding to their cognate receptors.

[0403] In a preferred embodiment of the invention a NEOKINE or NEOKINE modulator is useful for regulating, preventing and/or treating at least one or more of the following proliferative diseases or disorders: (1) cancers of the epithelia (e.g., carcinomas of the pancreas, stomach, liver, secretory glands (e.g., adenocarcinoma) bladder, lung, breast, skin (e.g., malignant melanoma), reproductive tract including prostate gland, ovary, cervix and uterus); (2) cancers of the hematopoietic and immune system (e.g., leukemias and lymphomas); (3) cancers of the central nervous, brain system and eye (e.g., gliomas, neuroblastoma and retinoblastoma); and (4) cancers of connective tissues, bone, muscles and vasculature (e.g., sarcomas).

[0404] In yet another embodiment of the invention, a NEOKINE or NEOKINE modulator is useful for regulating, preventing and/or treating at least one or more of the following diseases or disorders: (1) inflammation; (2) psoriasis; (3) immune rejection following skin graft; (4) immune rejection following kidney transplant; (5) kidney inflammation in acute renal failure; (6) brain inflammation following stroke or ischaemia; and (7) brain inflammation following viral infection.

[0405] Accordingly, another embodiment of the invention features isolated NEOKINE proteins and polypeptides having a NEOKINE activity. Preferred NEOKINE proteins have at least one NEOKINE CXC signature motif and a NEOKINE activity. In another preferred embodiment, a NEOKINE protein further comprises a signal sequence. In still another preferred embodiment, a NEOKINE protein has a NEOKINE CXC signature motif, a NEOKINE activity, and an amino acid sequence sufficiently homologous to an amino acid sequence of SEQ ID NO:116, SEQ ID NO:119, SEQ ID NO:122, or SEQ ID NO:125.

[0406] The human NEOKINE-1 cDNA, which is approximately 1564 nucleotides in length, encodes a protein which is approximately 99 amino acid residues in length. The human NEOKINE-1 protein contains at least a NEOKINE CXC signature motif. A NEOKINE CXC signature motif can be found at least, for example, from about amino acids 25-72 of SEQ ID NO:116. The human NEOKINE-1 protein is predicted to be a secreted protein which further contains a signal sequence at about amino acids 1-22 of SEQ ID NO:116. The prediction of such a signal peptide can be made, for example, utilizing the computer algorithm SIGNALP (Henrik, et al. (1997) Protein Engineering 10:1-6).

[0407] The murine NEOKINE-1 cDNA, which is approximately 1564 nucleotides in length, encodes approximately 99 amino acid residues of the murine NEOKINE-1 protein. The murine NEOKINE-1 protein contains a NEOKINE CXC signature motif. A NEOKINE CXC signature motif can be found at least, for example, from about amino acids 25-72 of SEQ ID NO:119. The murine NEOKINE-1 protein is predicted to be a secreted protein which further contains a signal sequence at about amino acids 1-22 of SEQ ID NO:119.

[0408] The rat NEOKINE-1 cDNA, which is approximately 1372 nucleotides in length, encodes approximately 79 amino acid residues of the rat NEOKINE-1 protein. The rat NEOKINE-1 protein contains a NEOKINE CXC signature motif. A NEOKINE CXC signature motif comprises at least about amino acids 4-51 of SEQ ID NO:122. The rat NEOKINE-1 protein is predicted to be a secreted protein.

[0409] The macaque NEOKINE-1 cDNA, which is approximately 1458 nucleotides, encodes approximately 94 amino acid residues of the macaque NEOKINE-1 protein. The macaque NEOKINE-1 protein contains a NEOKINE CXC signature motif. A NEOKINE CXC signature motif comprises at least about amino acids 20-67 of SEQ ID NO:135. The macaque NEOKINE-1 protein is predicted to be a secreted protein which further contains a signal sequence including at least amino acids 1-17 of SEQ ID NO:135.

### TANGO 129

[0410] Members of the tumor necrosis factor (TNF) superfamily and their receptors, both of which are expressed on activated T cells and elsewhere, are thought to play an important role in T-cell activation and stimulation, cell proliferation and differentiation, as well as apoptosis.

[0411] Proteins that are members of the TNF superfamily initiate signal transduction by binding to receptors, members of the TNF receptor (TNFR) superfamily, which lack intrinsic catalytic activity. This is in marked contrast epidermal growth factor and platelet-derived growth factor both of which bind to receptors having an intracellular tyrosine kinase domain which causes receptor autophosphorylation and initiates downstream phosphorylation events.

[0412] Members of the TNFR superfamily carry out signal transduction by interacting with members of the Janus or JAK family of tyrosine kinases. In turn, JAK family members interact with STAT (signal transducers and activators of transcription) family members, a class of transcriptional activators.

[0413] The present invention is based on the discovery of a cDNA molecule encoding human TANGO129 (T129), a member of the TNF receptor superfamily.

[0414] A nucleotide sequence encoding a human T129 protein is shown in SEQ ID NO:137; and SEQ ID NO:139 (open reading frame only). A predicted amino acid sequence of T129 protein is also shown in SEQ ID NO:138.

[0415] The T129 cDNA of SEQ ID NO:137, which is approximately 2570 nucleotides long including untranslated regions, encodes a protein amino acid having a molecular weight of approximately 46 kDa (excluding post-translational modifications).

[0416] Alignment of the TNFR/NGFR cysteine-rich domain of human T129 protein (SEQ ID NO:142) with a TNFR/NGFR cysteine-rich domain consensus derived from a hidden Markov model (PF00020; SEQ ID NO:5), revealed some similarity.

[0417] An approximately 3.0 kb T129 mRNA transcript is expressed at a moderate level in peripheral blood leukocytes, spleen, and skeletal muscle. Lower levels of this transcript were observed in heart, brain, and placenta. Human T129 is one member of a family of molecules (the “T129 family”) having certain conserved structural and functional features. The term “family” when referring to the protein and nucleic acid molecules of the invention is intended to mean two or more proteins or nucleic acid molecules having a common structural domain and having sufficient amino acid or nucleotide sequence identity as defined herein. Such family members can be naturally occurring and can be from either the same or different species. For example, a family can contain a first protein of human origin and a homologue of that protein of murine origin, as well as a second, distinct protein of human origin and a murine homologue of that protein. Members of a family may also have common functional characteristics.

[0418] In one embodiment, a T129 protein includes a TNFR/NGFR domain having at least about 65%, preferably at least about 75%, and more preferably about 85%, 95%, or 98% amino acid sequence identity to the TNFR/NGFR domain of SEQ ID NO:141.

[0419] Preferred T129 polypeptides of the present invention have an amino acid sequence sufficiently identical to the TNFR/NGFR domain amino acid sequence of SEQ ID NO:141. As used herein, the term “sufficiently identical” refers to a first amino acid or nucleotide sequence which contains a sufficient or minimum number of identical or equivalent (e.g., an amino acid residue which has a similar side chain) amino acid residues or nucleotides to a second amino acid or nucleotide sequence such that the first and second amino acid or nucleotide sequences have a common structural domain and/or common functional activity. For example, amino acid or nucleotide sequences which contain a common structural domain having about 65% identity, preferably 75% identity, more preferably 85%, 95%, or 98% identity are defined herein as sufficiently identical.

[0420] As used interchangeably herein a “T129 activity”, “biological activity of T129” or “functional activity of T129”, refers to an activity exerted by a T129 protein, polypeptide or nucleic acid molecule on a T129 responsive cell as determined in vivo, or in vitro, according to standard techniques. A T129 activity can be a direct activity, such as an association with or an enzymatic activity on a second protein or an indirect activity, such as a cellular signaling activity mediated by interaction of the T129 protein with a second protein. In a preferred embodiment, a T129 activity includes at least one or more of the following activities: (i) interaction with proteins in the T129 signaling pathway (ii) interaction with a T129 ligand; or (iii) interaction with an intracellular target protein.

[0421] Accordingly, another embodiment of the invention features isolated T129 proteins and polypeptides having a T129 activity.

[0422] Yet another embodiment of the invention features T129 molecules which contain a signal sequence. Generally, a signal sequence (or signal peptide) is a peptide containing about 20 amino acids which occurs at the extreme N-terminal end of secretory and integral membrane proteins and which contains large numbers of hydrophobic amino acid residues and serves to direct a protein containing such a sequence to a lipid bilayer.

### A259

[0423] The A259 proteins and nucleic acid molecules comprise a family of molecules having certain conserved structural and functional features. As used herein, the term “family” is intended to mean two or more proteins or nucleic acid molecules having a common structural domain and having sufficient amino acid or nucleotide sequence identity as defined herein. Family members can be from either the same or different species. For example, a family can comprises two or more proteins of human origin, or can comprise one or more proteins of human origin and one or more of non-human origin. Members of the same family may also have common structural domains.

[0424] For example, A259 proteins of the invention have signal sequences. As used herein, a “signal sequence” includes a peptide of at least about 15 or 20 amino acid residues in length which occurs at the N-terminus of secretory and membrane-bound proteins and which contains at least about 70% hydrophobic amino acid residues such as alanine, leucine, isoleucine, phenylalanine, proline, tyrosine, tryptophan, or valine. In a preferred embodiment, a signal sequence contains at least about 10 to 40 amino acid residues, preferably about 15-30 amino acid residues, more preferably about 22 amino acid residues, and has at least about 60-80%, more preferably 65-75%, and more preferably at least about 70% hydrophobic residues. A signal sequence serves to direct a protein containing such a sequence to a lipid bilayer. Thus, in one embodiment, an A259 protein contains a signal sequence at about amino acids 1 to 22 of SEQ ID NO:147 (SEQ ID NO:149). The signal sequence is cleaved during processing of the mature protein.

[0425] In another example, an A259 family member also includes one or more of the following domains: (1) an extracellular domain; (2) a transmembrane domain; and (3) a cytoplasmic domain. Thus, in one embodiment, an A259 protein contains an extracellular domain at about amino acids 1 to 1141 of SEQ ID NO:147 (SEQ ID NO:150). In another embodiment, an A259 protein contains a transmembrane domain at about amino acids 1142 to 1164 of SEQ ID NO:147 (SEQ ID NO:159). In another embodiment, an A259 protein contains a cytoplasmic domain at about amino acids 1165 to 1188 of SEQ ID NO:147 (SEQ ID NO:160).

[0426] In one embodiment, the extracellular domain of A259 can include an inserted domain (“I” domain). In another embodiment, the I domain is located between integrin α-subunit repeat domains 2 and 3.

[0427] In a preferred embodiment, an A259 family member has the amino acid sequence of SEQ ID NO:147 wherein the extracellular domain is located at about amino acids 1 to 1141 (SEQ ID NO:150), the I domain (SEQ ID NO:151) is located at about amino acid positions 164 to 345, and the integrin α-subunit repeat domains on either side of the I domain (integrin α-subunit repeat domains 2 and 3) are located at amino acid positions 115 to 157 (SEQ ID NO:153) and 367 to 392 (SEQ ID NO:154), respectively.

[0428] An A259 family member can include one or more integrin α-subunit repeat domains within the extracellular domain. As used herein, a “repeat domain” refers to one or more of seven homologous protein domains that are conserved in integrin α-subunit family members, which are about 10 to 65 residues, preferably about 20 to 50 residues, more preferably about 25 to 45 amino acid residues, and most preferably about 26 to 43 residues, in length, and which are about 10 to 50, preferably about 15 to 40, more preferably about 20 to 35 amino acids apart from one another.

[0429] A repeat domain typically has one of the two following consensus sequences. The first repeat consensus sequence (type 1) is: F-G-Xaa(n)-[G or A]-A-[P or L or Q] (SEQ ID NO:189), wherein F is phenylalanine, G is glycine, Xaa is any amino acid, n is about 10 to 30 amino acid residues, preferably about 15 to 20 amino acid residues, more preferably about 16 to 19 amino acid residues, A is alanine, P is proline, L is leucine, and Q is glutamine. The second repeat consensus sequence (type 2) is: [G or S]-[F or Y]-Xaa(n)-[G or V or L]-[A or M]-[P or Y] (SEQ ID NO:190), wherein G is glycine, S is serine, F is phenylalanine, Y is tyrosine, Xaa is any amino acid, n is about 5 to 40 amino acid residues, preferably about 10 to 35 amino acid residues, more preferably about 14 to 33 amino acid residues, V is valine, A is alanine, M is methionine, and P is proline.

[0430] In one embodiment, an A259 family member includes one or more repeat domains having an amino acid sequence that is at least about 55%, preferably at least about 65%, more preferably at least about 75%, yet more preferably at least about 85%, and most preferably at least about 95% identical to amino acids 39 to 74, and/or 115 to 157, and/or 367 to 392, and/or 421 to 455, and/or 478 to 516, and/or 540 to 575, and/or 602 to 640 of SEQ ID NO:147, which are the repeat domains of A259 (these repeat domains are also represented as SEQ ID NO:152, 153, 154, 155, 156, 157, and 158, respectively). In another embodiment, an A259 family member includes one or more repeat domains having an amino acid sequence that is at least about 55%, preferably at least about 65%, more preferably at least about 75%, yet more preferably at least about 85%, and most preferably at least about 95% identical to amino acids 39 to 74, and/or 115 to 157, and/or 367 to 392, and/or 421 to 455, and/or 478 to 516, and/or 540 to 575, and/or 602 to 640 of SEQ ID NO:147, which are the repeat domains of A259 (these repeat domains are also represented as SEQ ID NO:152, 153, 154, 155, 156, 157, and 158, respectively), and has one or more repeat consensus sequences described herein. In another embodiment, an A259 family member includes one or more repeat domains having an amino acid sequence that is at least about 55%, preferably at least about 65%, more preferably at least about 75%, yet more preferably at least about 85%, and most preferably at least about 95% identical to amino acids 39 to 74, and/or 115 to 157, and/or 367 to 392, and/or 421 to 455, and/or 478 to 516, and/or 540 to 575, and/or 602 to 640 of SEQ ID NO:147, which are the repeat domains of A259 (these repeat domains are also represented as SEQ ID NO:152, 153, 154, 155, 156, 157, and 158, respectively), has one or more I consensus sequences described herein, and has at least one A259 biological activity as described herein.

[0431] An A259 family member can also include an inserted, or I domain (also called von Willebrand factor type A domain). As used herein, an “I domain” refers to a domain that appears in only some of the integrin α subunits, e.g., α1, α2, αM, and αX, and that is inserted between the second and third integrin α-subunit repeat domains. I domains prevent the occurrence of proteolytic cleavage that separates integrin α subunits into heavy and light fragments that are disulfide linked. An I domain includes about 100 to 300 amino acid residues, preferably about 150 to 200 amino acid residues, more preferably about 160 to 190 amino acid residues, and most preferably about 182 amino acid residues.

[0432] An I domain typically has the following consensus sequence: D-G-S-Xaa-S-Xaa(n1)-F-Xaa(n2)-Q-Y (SEQ ID NO:191), wherein D is aspartic acid, G is glycine, S is serine, Xaa is any amino acid, n1 is about 5 to 15, preferably about 8 to 12, more preferably about 9 to 11 amino acid residues, F is phenylalanine, n2 is about 15 to 30, preferably 18 to 28, more preferably about 20 to 26 amino acid residues, Q is glutamine, and Y is tyrosine.

[0433] In one embodiment, an A259 family member includes an I domain having an amino acid sequence that is at least about 55%, preferably at least about 65%, more preferably at least about 75%, yet more preferably at least about 85%, and most preferably at least about 95% identical to amino acids 164 to 345 of SEQ ID NO:147, which is the I domain of A259 (this I domain is also represented as SEQ ID NO:151). In another embodiment, an A259 family member includes an I domain having an amino acid sequence that is at least about 55%, preferably at least about 65%, more preferably at least about 75%, yet more preferably at least about 85%, and most preferably at least about 95% identical to amino acids 164 to 345 of SEQ ID NO:147, which is the I domain of A259 (this I domain is also represented as SEQ ID NO:151), and an I domain consensus sequence described herein. In another embodiment, an A259 family member includes an I domain having an amino acid sequence that is at least about 55%, preferably at least about 65%, more preferably at least about 75%, yet more preferably at least about 85%, and most preferably at least about 95% identical to amino acids 164 to 345 of SEQ ID NO:147, which is the I domain of A259 (this I domain is also represented as SEQ ID NO:151). In another embodiment, an A259 family member includes an I domain having an amino acid sequence that is at least about 55%, preferably at least about 65%, more preferably at least about 75%, yet more preferably at least about 85%, and most preferably at least about 95% identical to amino acids 164 to 345 of SEQ ID NO:147, which is the I domain of A259 (this I domain is also represented as SEQ ID NO:151), has one or more I domain consensus sequences described herein, and has at least one A259 biological activity as described herein.

[0434] An A259 family member can also include a cytoplasmic domain. The cytoplasmic domain typically includes about 10 to 40, preferably about 20 to 30, more preferably about 22 to 28, still more preferably about 22 to 26 amino acid residues in length. The A259 cytoplasmic domain typically has the following consensus sequence: [F or Y or W or S]-[R or K]-Xaa(n1)-G-F-F-Xaa(n2)-R (SEQ ID NO:192), wherein F is phenylalanine, Y is tyrosine, W is tryptophan, S is serine, R is arginine, K is lysine, Xaa is any amino acid, n1 and n2 are 0 to 1, and G is glycine.

[0435] In a preferred embodiment, an A259 family member has the amino acid sequence of SEQ ID NO:147 wherein the cytoplasmic domain is located at about amino acids 1165 to 1188 (SEQ ID NO:160) and the cytoplasmic domain consensus sequence is located from about amino acid 1165 to 1170.

[0436] Various features of human and murine A259 are summarized below.

### Human A259

[0437] A cDNA encoding human A259 was identified by analyzing the sequences of clones present in an LPS stimulated human primary osteoblast cDNA library. This analysis led to the identification of a clone, Atho002i17, encoding full-length human A259. The human A259 cDNA of this clone is 5042 nucleotides long (SEQ ID NO:145). The open reading frame of this cDNA, nucleotides 127 to 3690 of SEQ ID NO:145 (SEQ ID NO:146), encodes a 1188 amino acid receptor protein (SEQ ID NO:147).

[0438] The signal peptide prediction program SIGNALP (Nielsen et al. (1997) Protein Engineering 10:1-6) predicted that human A259 includes a 22 amino acid signal peptide (amino acid 1 to about amino acid 22 of SEQ ID NO:147; SEQ ID NO:149) preceding the mature A259 protein (corresponding to about amino acid 23 to amino acid 1188 of SEQ ID NO:147) (SEQ ID NO:148). The human A259 protein molecular weight is 133.5 kDa prior to the cleavage of the signal peptide, 131.1 kDa after cleavage of the signal peptide.

[0439] Human A259 includes a extracellular domain (about amino acids 1 to 1141 of SEQ ID NO:147; SEQ ID NO:150), an I domain (also called a Von Willebrand Factor type A domain; about amino acids 164 to 345 of SEQ ID NO:147; SEQ ID NO:151), seven repeat domains (about amino acids 39 to 74, 115 to 157, 367 to 392, 421 to 455, 478 to 516, 540 to 575, and 602 to 640 of SEQ ID NO:147 (SEQ ID NO:152, 153, 154, 155, 156, 157, and 158, respectively)), a transmembrane domain (about amino acids 1142 to 1164 of SEQ ID NO:147; SEQ ID NO:159), and a cytoplasmic domain (about amino acids 1165 to 1188 of SEQ ID NO:147; SEQ ID NO:160).

[0440] A slightly different model of the integrin alpha repeat domain identifies five integrin alpha repeat domains within human A259 (about amino acids 37-90, 421-472, 476-532, 538-593, and 600-654 of SEQ ID NO:147 (SEQ ID NOS:179, 180, 181, 182, and 183, respectively)). These domains were identified by homology searching using consensus domains derived from hidden Markov models (HMMs). HMMs can be used to do multiple sequence alignment and very sensitive database searching, using statistical descriptions of a sequence family's consensus. FIG. 12A depicts an alignment of amino acids 37-90 of human A259 (SEQ ID NO:179) with a consensus integrin alpha repeat domain derived from a hidden Markov model (SEQ ID NO:184). FIG. 12B depicts an alignment of amino acids 421-472 of human A259 (SEQ ID NO:180) with a consensus integrin alpha repeat domain derived from a hidden Markov model (SEQ ID NO:184). FIG. 12C depicts an alignment of amino acids 476-532 of human A259 (SEQ ID NO:181) with a consensus integrin alpha repeat domain derived from a hidden Markov model (SEQ ID NO:184). FIG. 12D depicts an alignment of amino acids 538-593 of human A259 (SEQ ID NO:182) with a consensus integrin alpha repeat domain derived from a hidden Markov model (SEQ ID NO:184). FIG. 12E depicts an alignment of amino acids 600-654 of human A259 (SEQ ID NO:183) with a consensus integrin alpha repeat domain derived from a hidden Markov model (SEQ ID NO:184).

[0441] Predicted N-glycosylation sites are found from amino acids 82 to 85, 95 to 98, 291 to 294, 331 to 334, 358 to 361, 449 to 452, 462 to 465, 528 to 531, 642 to 645, 694 to 697, 857 to 860, 894 to 897, 973 to 976, 1031 to 1034, 1039 to 1042 and 1059 to 1062 of SEQ ID NO:147. A cAMP and cGMP-dependent protein kinase phosphorylation site is found from amino acids 700 to 703 of SEQ ID NO:147.

[0442] Predicted protein kinase C phosphorylation sites are found from amino acids 27 to 29, 97 to 99, 221 to 223, 287 to 289, 355 to 357, 434 to 436, 451 to 453, 530 to 532, 548 to 550, 587 to 589, 662 to 664, 703 to 705, 716 to 718, 770 to 772, 833 to 835, 938 to 940, 1092 to 1094, 1100 to 1102, 1171 to 1173 and 1183 to 1185 of SEQ ID NO:147.

[0443] Predicted casein kinase II phosphorylation sites are found from amino acids 161 to 164, 221 to 224, 230 to 233, 270 to 273, 287 to 290, 322 to 325, 485 to 488, 530 to 533, 548 to 551, 556 to 559, 593 to 596, 662 to 665, 696 to 669, 724 to 727, 753 to 756, 801 to 804, 938 to 941, 966 to 969, 974 to 977, 1046 to 1049, 1061 to 1064 and 1133 to 1136 of SEQ ID NO:147.

[0444] A predicted tyrosine kinase phosphorylation site is found from amino acids 812 to 820 of SEQ ID NO:147.

[0445] Predicted N-myristoylation sites are found from amino acids 6 to 11, 35 to 40, 106 to 111, 236 to 241, 245 to 250, 257 to 262, 354 to 359, 363 to 368, 379 to 384, 422 to 427, 473 to 478, 481 to 486, 543 to 548, 625 to 630, 690 to 695, 725 to 730, 877 to 882, 930 to 935 and 1147 to 1152 of SEQ ID NO:147.

[0446] A predicted amidation site is found from amino acids 257 to 260 of SEQ ID NO:147. An immunoglobulin and major histocompatibility complex proteins signature is found from amino acids 74 to 80 of SEQ ID NO:147.

[0447] Human A259 is homologous to human integrin α10 (SEQ ID NO:161; GenBank Accession Number AF074015), a β1-associated collagen binding integrin (Camper, Hellman, and Lundgren-Akerlund (1998) Journal of Biol. Chem. 273, 32:20383-20389). The human A259 signal sequence is represented by amino acids 1 to 22 (and encoded by nucleotides 127 to 192 of SEQ ID NO:145). The human α10 integrin signal sequence is represented by amino acids 1 to 22 (and encoded by nucleotides 22 to 87 of SEQ ID NO:161). The human A259 extracellular domain sequence (SEQ ID NO:150) is represented by amino acids 1 to 1141 (and encoded by nucleotides 127 to 3549 of SEQ ID NO:145), and the human α10 extracellular domain sequence is represented by amino acids 1 to 1098 (and encoded by nucleotides 22 to 3381 of SEQ ID NO:161). The human A259 I domain (SEQ ID NO:151) is represented by amino acids 164 to 345 (and encoded by nucleotides 616 to 1161 of SEQ ID NO:145), and the human α10 I domain is represented by amino acids 140 to 337 (and encoded by nucleotides 505 to 1098 of SEQ ID NO:161). The human A259 transmembrane domain (SEQ ID NO:159) is represented by amino acids 1142 to 1164 (and encoded by nucleotides 3550 to 3618 of SEQ ID NO:145), and the human α10 transmembrane domain is represented by amino acids 1099 to 1123 (and encoded by nucleotides 3382 to 3456 of SEQ ID NO:161). The human A259 cytoplasmic domain (SEQ ID NO:160) is represented by amino acids 1165 to 1188 (and encoded by nucleotides 3619 to 3690 of SEQ ID NO:145), and the human α10 cytoplasmic domain is represented by amino acids 1124 to 1145 (and encoded by nucleotides 3457 to 3522 of SEQ ID NO:161).

[0448] Alignments have shown that there is an overall 46.3% identity between the full length human A259 nucleic acid molecule and the full length human α10 molecule, and a 43.0% identity between the A259 amino acid sequence and the human α10 amino acid sequence. There is also a 55.1% identity between the human A259 and the human α10 open reading frames. There is also an overall 37.6% amino acid identity, and a 41.5% full length nucleic acid identity, between the full length human A259 nucleic acid molecule and the full length human α1 (VLA-1 (very late antigen-1) molecule.

[0449] Human A259 is homologous to murine A259. The human A259 signal sequence is represented by amino acids 1 to 22 (and encoded by nucleotides 127 to 192 of SEQ ID NO:145). The murine A259 signal sequence is represented by amino acids 1 to 22 (and encoded by nucleotides 28 to 93 of SEQ ID NO:163). The human A259 extracellular domain sequence (SEQ ID NO:150) is represented by amino acids 1 to 1141 (and encoded by nucleotides 127 to 3549 of SEQ ID NO:145), and the murine A259 extracellular domain sequence is represented by amino acids 1 to 1141 (and encoded by nucleotides 28 to 3450 of SEQ ID NO:163). The human A259 I domain (SEQ ID NO:151) is represented by amino acids 164 to 345 (and encoded by nucleotides 616 to 1161 of SEQ ID NO:145), and the murine A259 I domain is represented by amino acids 164 to 345 (and encoded by nucleotides 517 to 1062 of SEQ ID NO:163). The human A259 repeat domains are represented by amino acids 39 to 74, 115 to 157, 367 to 392, 421 to 455, 478 to 516, 540 to 575, and 602 to 640 (and encoded by nucleotides 244 to 348, 469 to 597, 1225 to 1302, 1387 to 1491, 1558 to 1674, 1744 to 1851, and 1930 to 2046, respectively, of SEQ ID NO:145), and the murine A259 repeat domains are represented by amino acids 39 to 74, 115 to 157, 367 to 392, 421 to 455, 478 to 516, 540 to 575, and 602 to 640 (and encoded by nucleotides 145 to 249, 370 to 498, 1126 to 1203, 1288 to 1392, 1459 to 1575, 1645 to 1752, and 1831 to 1947, respectively, of SEQ ID NO:163). The human A259 transmembrane domain (SEQ ID NO:159) is represented by amino acids 1142 to 1164 (and encoded by nucleotides 3550 to 3618 of SEQ ID NO:145), and the murine A259 transmembrane domain is represented by amino acids 1142 to 1164 (and encoded by nucleotides 3283 to 3357 of SEQ ID NO:163). The human A259 cytoplasmic domain (SEQ ID NO:160) is represented by amino acids 1165 to 1188 (and encoded by nucleotides 3619 to 3690 of SEQ ID NO:145), and the murine A259 cytoplasmic domain is represented by amino acids 1165 to 1188 (and encoded by nucleotides 3358 to 3423 of SEQ ID NO:163).

[0450] Alignments show that there is an overall 78.4% identity between the full length human A259 nucleic acid molecule and the full length murine A259 molecule, and a 90.3% identity between the A259 amino acid sequence and the murine A259 amino acid sequence. There is also an 86.8% identity between the human and murine A259 open reading frames.

[0451] Clone Human I2, which encodes human A259, was deposited with the American Type Culture Collection (10801 University Boulevard, Manassas, Va. 20110-2209) on Apr. 2, 1999 and assigned Accession Number 207190. This deposit will be maintained under the terms of the Budapest Treaty on the International Recognition of the Deposit of Microorganisms for the Purposes of Patent Procedure. This deposit was made merely as a convenience for those of skill in the art and is not an admission that a deposit is required under 35 U.S.C. 112.

[0452] FIG. 10 depicts a hydropathy plot of human A259. Relatively hydrophobic regions of the protein are shown above the horizontal line, and relatively hydrophilic regions of the protein are below the horizontal line. The cysteine residues (cys) and predicted N-glycosylation sites are indicated by short vertical lines just below the hydropathy trace. The dashed vertical line separates the signal sequence (amino acids 1 to 22 of SEQ ID NO:147; SEQ ID NO:149) on the left from the mature protein (amino acids 23 to 1188 of SEQ ID NO:147; SEQ ID NO:148) on the right. The A259 transmembrane domain is indicated by the section of the plot under which the number 6.4 can be seen, which represents a score assigned to the predicted transmembrane domain. The extracellular domain (SEQ ID NO:150) and cytoplasmic domain (SEQ ID NO:160) are similarly indicated by gray horizontal bars, labeled as “out” and “in”, respectively.

[0453] An electronic survey of proprietary databases revealed that A259 is found in abundantly in human and mouse osteoblast cDNA libraries and also in human bone marrow and neuronal cDNA libraries. In addition, in a Northern blot containing RNA from human tissues, A259 was expressed as two messages, a 6 kb and a 4 kb message, in RNA from human osteoblasts. The sequence used to probe this human Northern blot contained human A259 C-terminal and 3′ untranslated regions. The expression level in human osteoblasts did not change when stimulated with TNF-α.

[0454] The expression of human A259 was measured in various clinical liver samples taken from subjects not suffering from liver fibrosis and from patients suffering from liver fibrosis using TaqMan quantitative PCR. The results of this analysis are depicted in FIG. 13A. Human A259 was expressed at a lower level in the livers of patients not suffering from liver fibrosis (A, B, and C; relative expression 0.13, 0.29, and 0.09, respectively) than in the livers of patients suffering from liver fibrosis (D, E, F, G, H, I, J, and K; relative expression 1.59, 0.50, 0.55, 1.56, 0.62, 0.93, 3.54, and 0.61, respectively).

[0455] The expression of human A259 was measured in various cells using TaqMan quantitative PCR. The results of this analysis are depicted in FIG. 13B. The cells tested were: heart (A; relative expression 1.69), lung (B; relative expression 0.41), liver (C; relative expression 0.10), passaged stellate cells (D; relative expression 36.15), quiescent stellate cells (E; relative expression 0.15), stellate cells (F; relative expression 18.71); stellate/F BS cells (G; relative expression 31.03), NHDF fibroblasts (H; relative expression 0.71); TGF-treated NHDF fibroblasts (I; relative expression 12.69); NHLF fibroblasts (J; relative expression 4.81); and TGF-treated NHLF fibroblasts (K; relative expression 66.06).

[0456] Human A259 maps to human chromosome location hu15q22. The flanking markers are AFM094YC1 and NIB1778. The nearby known disease loci include: CLN6 (neuronal ceroid-lipofuscinosis) and BBS4 (Bardet-Biedl Syndrome 4). The nearby known genes include: HDC (histidine decarboxylase), LIPC (hepatic lipase), PKM2 (pyruvate kinase 3), CLN6 (neuronal ceroid-lipofuscinosis), BBS4 (Bardet-Biedl Syndrome 4), and NMB (neuromedin B). The murine syntenic chromosomal location is mo9. The known nearby loci include: rc (rough coat), ash (ashen), flail (flailer), pml (promyelotic leukemia), and sty (small thymus). The known nearby genes include: hpl (hepatitic lipase).

### Murine A259

[0457] A cDNA encoding human A259 was identified by analyzing the sequences of clones present in a murine bone marrow cDNA library. This analysis led to the identification of a clone, AtmMa113d1, encoding full-length murine A259. The murine A259 cDNA of this clone is 4858 nucleotides long (SEQ ID NO:163). The open reading frame of this cDNA, nucleotides 28 to 3591 of SEQ ID NO:163 (SEQ ID NO:164), encodes a 1188 amino acid receptor protein (SEQ ID NO:165).

[0458] The signal peptide prediction program SIGNALP (Nielsen et al. (1997) Protein Engineering 10:1-6) predicted that murine A259 includes a 22 amino acid signal peptide (amino acid 1 to about amino acid 22 of SEQ ID NO:165) (SEQ ID NO:167) preceding the mature A259 protein (corresponding to about amino acid 23 to amino acid 1188 of SEQ ID NO:165) (SEQ ID NO:166). The mouse A259 protein molecular weight is 133.1 kDa prior to the cleavage of the signal peptide, 130.5 kDa after cleavage of the signal peptide.

[0459] Murine A259 includes a extracellular domain (about amino acids 1 to 1141 of SEQ ID NO:165; SEQ ID NO:168), an I domain (about amino acids 164 to 345 of SEQ ID NO:165; SEQ 169), seven repeat domains (about amino acids 39 to 74, 115 to 157, 367 to 392, 421 to 455, 478 to 516, 540 to 575, and 602 to 640 of SEQ ID NO:165 (SEQ ID NO:170, 171, 172, 173, 174, 175, and 176, respectively)), a transmembrane domain (about amino acids 1142 to 1164 of SEQ ID NO:165; SEQ ID NO:177), and a cytoplasmic domain (about amino acids 1165 to 1188 of SEQ ID NO:165; SEQ ID NO:178).

[0460] Predicted N-glycosylation sites are found from amino acids 82 to 85, 95 to 98, 291 to 294, 331 to 334, 358 to 361, 449 to 452, 462 to 465, 528 to 531, 642 to 645, 694 to 697, 857 to 860, 894 to 897, 973 to 976, 1031 to 1034, 1039 to 1042 and 1059 to 1062 of SEQ ID NO:165.

[0461] Predicted protein kinase C phosphorylation sites are found from amino acids 51 to 53, 97 to 99, 221 to 223, 287 to 289, 355 to 357, 434 to 436, 451 to 453, 530 to 532, 569 to 571, 716 to 718, 770 to 772, 833 to 835, 1092 to 1094, 1100 to 1102 and 1171 to 1173 of SEQ ID NO:165.

[0462] Predicted casein kinase II phosphorylation sites are found from amino acids 161 to 164, 221 to 224, 230 to 233, 270 to 273, 287 to 290, 322 to 325, 485 to 488, 530 to 533, 548 to 551, 556 to 559, 593 to 596, 696 to 669, 724 to 727, 753 to 756, 801 to 804, 859 to 862, 938 to 941, 966 to 969, 974 to 977, 1046 to 1049, 1061 to 1064 and 1133 to 1136 of SEQ ID NO:165.

[0463] A predicted tyrosine kinase phosphorylation site is found from amino acids 812 to 820.

[0464] Predicted N-myristoylation sites are found from amino acids 6 to 11, 106 to 111, 236 to 241, 245 to 250, 257 to 262, 354 to 359, 363 to 368, 379 to 384, 477 to 482, 543 to 548, 625 to 630, 690 to 695, 725 to 730, 1030 to 1035 and 1147 to 1152 of SEQ ID NO:165.

[0465] Predicted amidation site are found from amino acids 51 to 54 and 257 to 260 of SEQ ID NO:165.

[0466] Clone Mouse 12, which encodes murine A259, was deposited with the American Type Culture Collection (10801 University Boulevard, Manassas, Va. 20110-2209) on Apr. 2, 1999 and assigned Accession Number 207191. This deposit will be maintained under the terms of the Budapest Treaty on the International Recognition of the Deposit of Microorganisms for the Purposes of Patent Procedure. This deposit was made merely as a convenience for those of skill in the art and is not an admission that a deposit is required under 35 U.S.C. 112.

[0467] FIG. 11 depicts a hydropathy plot of murine A259. Relatively hydrophobic regions of the protein are shown above the horizontal line, and relatively hydrophilic regions of the protein are below the horizontal line. The cysteine residues (cys) and predicted N-glycosylation sites are indicated by short vertical lines just below the hydropathy trace. The dashed vertical line separates the signal sequence (amino acids 1 to 22 of SEQ ID NO:165; SEQ ID NO:167) on the left from the mature protein (amino acids 23 to 1188 of SEQ ID NO:165; SEQ ID NO:166) on the right. The A259 transmembrane domain is indicated by the section of the plot under which the number 6.4 can be seen, which represents a score assigned to the predicted transmembrane domain. The extracellular domain (SEQ ID NO:168) and cytoplasmic domain (SEQ ID NO:178) are similarly indicated by gray horizontal bars, labeled as “out” and “in”, respectively.

[0468] In situ data of A259 expression in mouse is summarized as follows: During embryogenesis, E13.5 through postnatal day 1.5 tested, all developing bone structures have strong expression. The signal is located mostly at the edge of the developing bones. Beginning at E14.5 the bone marrow space can be seen and is negative for expression. However, some large bones have signal in the bone, not just at the edge. Signal is also observed in the small intestine, diaphragm and to a lesser extent the muscle layer under the skin. The diaphragm and intestine expression pattern is suggestive of smooth muscle. The expression in these tissues is strongest at E15.5 and E16.5 and decreases to almost background levels by P1.5. Adult expression is observed in a small number of tissues examined, including brain, submandibular gland, bladder, colon, small intestine, liver, spleen, and placenta. The signal in positive tissues is very weak in all but the mucosal epithelium of the bladder which has the strongest expression. There is no expression observed in the following tested tissues: spinal cord, eye and harderian gland, white fat, brown fat, stomach, heart, kidney, adrenal gland, thymus, lymph node, lung, pancreas, skeletal muscle, and testes.

Uses of A259 Nucleic acids, Polypeptides, and Modulators Thereof

[0469] As human A259 was originally found in a LPS stimulated human primary osteoblast library, A259 nucleic acids, proteins, and modulators thereof can be used to modulate the proliferation, differentiation, and/or function of cells that form bone matrix, e.g., osteoblasts and osteoclasts, and can be used to modulate the formation of bone matrix. Thus A259 nucleic acids, proteins, and modulators thereof can be used to treat cartilage and bone associated diseases and disorders, and can play a role in bone growth, formation, and remodeling. Examples of cartilage and bone associated diseases and disorders include e.g., bone cancer, achondroplasia, myeloma, fibrous dysplasia, scoliosis, osteoarthritis, osteosarcoma, and osteoporosis.

[0470] As murine A259 was originally found in a bone marrow library, A259 nucleic acids, proteins, and modulators thereof can be used to modulate the proliferation, differentiation, and/or function of cells that appear in the bone marrow, e.g., stem cells (e.g., hematopoietic stem cells), and blood cells, e.g., erythrocytes, platelets, and leukocytes. Thus A259 nucleic acids, proteins, and modulators thereof can be used to treat bone marrow, blood, and hematopoietic associated diseases and disorders, e.g., acute myeloid leukemia, hemophilia, leukemia, anemia (e.g., sickle cell anemia), and thalassemia.

[0471] As integrin family members play a role in immune response, A259 nucleic acids, proteins, and modulators thereof can be used to treat immune related disorders, e.g., immunodeficiency disorders (e.g., HIV), viral disorders (e.g., infection by HSV), cell growth disorders, e.g., cancers (e.g., carcinoma, lymphoma, e.g., follicular lymphoma), autoimmune disorders (e.g., arthritis, graft rejection (e.g., allograft rejection), T cell autoimmune disorders (e.g., AIDS)), and inflammatory disorders (e.g., bacterial or viral infection, psoriasis, septicemia, cerebral malaria, inflammatory bowel disease, arthritis (e.g., rheumatoid arthritis, osteoarthritis), allergic inflammatory disorders (e.g., asthma, psoriasis)).

[0472] As integrin family members play a role in cell growth, survival, proliferation, and migration, A259 nucleic acids, proteins, and modulators thereof can be used to treat apoptotic disorders (e.g., rheumatoid arthritis, systemic lupus erythematosus, insulin-dependent diabetes mellitus) proliferative disorders (e.g., cancers, e.g., B cell cancers stimulated by TNF), and disorders abnormal vascularization (e.g., cancer). In addition, A259 nucleic acids, proteins, and modulators thereof can also be used to promote vascularization (angiogenesis).

[0473] As integrins are cell adhesion molecules, A259 nucleic acids, proteins, and modulators thereof can be used to modulate disorders associated with adhesion and migration of cells, e.g., platelet aggregation disorders (e.g., Glanzmann's thromboasthemia, which is a bleeding disorders characterized by failure of platelet aggregation in response to cell stimuli), inflammatory disorders (e.g., leukocyte adhesion deficiency, which is a disorder associated with impaired migration of neutrophils to sites of extravascular inflammation), disorders associated with abnormal tissue migration during embryo development, and tumor metastasis.

[0474] A259 polypeptides, nucleic acids, and modulators thereof, can also be used to modulate the function, morphology, proliferation and/or differentiation of cells in the tissues in which it is expressed. Such molecules can be used to treat disorders associated with abnormal or aberrant metabolism or function of cells in the tissues in which it is expressed. Tissues in which A259 is expressed, and disorders of which A259 polypeptides, nucleic acids, and modulators thereof can be used to treat, include: bone (see disorders described herein); intestine (e.g., ischemic bowel disease, infective enterocolitis, Crohn's disease); brain (e.g., cerebral edema, hydrocephalus, brain herniations, iatrogenic disease (due to, e.g., infection, toxins, or drugs)); bladder (e.g., cystitis (bladder infection), incontinence); liver (e.g., jaundice, hepatic failure, hepatic circulatory disorders (e.g., hepatic vein thrombosis and portal vein obstruction and thrombosis), hepatitis (e.g., chronic active hepatitis, acute viral hepatitis, and toxic and drug-induced hepatitis), cirrhosis (e.g., alcoholic cirrhosis, biliary cirrhosis, and hemochromatosis)); spleen (e.g., amyloidosis, Niemann-Pick disease, splenomegaly); placenta (e.g., toxemia of pregnancy (e.g., preeclampsia and eclampsia, placentitis, spontaneous abortion); and neuronal tissue (e.g., epilepsy, muscular dystrophy, and neurodegenerative diseases such as Alzheimer's disease, Parkinson's disease, and Huntington's disease).

[0475] A259 is expressed at a higher level in the liver of patients suffering from liver fibrosis than in patients not suffering from liver fibrosis. Liver fibrosis, is caused by chronic injury to the liver arising from, e.g, alcohol abuse, drugs, viral infections (e.g., hepatitis B or hepatitis C), metabolic disorders (excessive iron or copper), autoimmune attack on hepatocytes or the bile duct, and congenital disorders. Liver fibrosis is a reversible condition and injury can be present for months or years before significant scar tissue accumulates. However, liver fibrosis leads to cirrhosis, which is generally not reversible.

[0476] The liver has four major components: epithelial cells (hepatocytes), endothelial cells; tissue macrophages (Kupffer cells), and a stellate cells (a type of perivascular mesenchymal cell). In normal liver the space between the epithelium and sinusoidal endothelium is filled with a type of extracellular matrix (ECM) that is somewhat similar to a basement membrane. In fibrosis the ECM undergoes a number of changes. The total content of collagens and other components increases several fold. In addition, there is an increase in fibril-forming collagens. Stellate cells are the primary fibrogenic cell of the liver. In response to injury, quiescent stellate cells are activated and become proliferative, fibrogenic, contractile myofibroblasts. Among the key mediators of these changes are: TGF-β1, MCP-1, PDGF, ET-1, and MMP-2. Kupffer cells, endothelial cells and hepatocytes produce factors which stimulate stellate cell activation. As noted above, human A259 is expressed at a high level in activated stellate cells. This result and the increased expression of A259 in clinical liver fibrosis samples, suggest that A259 plays a role in liver fibrosis. Thus, A259 nucleic acids, polypeptides, and modulators thereof can be used to diagnose and treat liver fibrosis as well as other types of fibrosis, e.g., kidney fibrosis or lung fibrosis. Thus, liver fibrosis can be treated using antibodies directed against A259, particularly the extracellular domain of A259, the I domain of A259, or a repeat domain of A259. Also useful are polypeptides which include one or more repeat domains of A259 and/or the I domain of A259.

[0477] Tables IV, V and VI below provide summaries of human A259 and murine A259 sequence information.

TABLE IV
Summary of Sequence Information of Human A259 and Murine A259.

| | | | | ATCC |
|---|---|---|---|---|
| | | Open Reading | | Accession |
| Gene | cDNA | Frame | Polypeptide | No. |
| Human A259 | SEQ ID | SEQ ID NO: 146 | SEQ ID | 207190 |
| | NO: 145 | | NO: 147 | |
| Murine A259 | SEQ ID | SEQ ID NO: 164 | SEQ ID | 207191 |
| | NO: 163 | | NO: 165 | |

TABLE V
Summary of Domains of Human A259 and Murine A259.

| | Signal | Mature | Extracellular | Transmembrane | Cytoplasmic |
|---|---|---|---|---|---|
| Protein | Sequence | Protein | Domain | Domain | Domain |
| Human | aa 1-22 | aa 23-1188 | aa 1-1141 | aa 1142-1164 | aa 1165-1188 |
| A259 | SEQ ID | SEQ ID | SEQ ID | SEQ ID NO: 159 | SEQ ID NO: 160 |
| | NO: 149 | NO: 148 | NO: 150 | | |
| Murine | aa 1-22 | aa 23-1188 | aa 1-1141 | aa 1142-1164 | aa 1165-1188 |
| A259 | SEQ ID | SEQ ID | SEQ ID | SEQ ID NO: 177 | SEQ ID NO: 178 |
| | NO: 167 | NO: 166 | NO: 168 | | |

TABLE VI
Summary of Domains of Human A259 and Murine A259.

| Protein | I Domain | Repeat Domain |
|---|---|---|
| Human | aa 164-345 | aa 39-74; 115-157; 367-392; 421-455; 478-516; |
| A259 | SEQ ID | 540-575; 602-640, SEQ ID NO: 152-158 |
| | NO: 151 | |
| Murine | aa 164-345 | aa 39-74; 115-157; 367-392; 421-455; 478-516; |
| A259 | SEQ ID | 540-575; 602-640, SEQ ID NO: 170-176 |
| | NO: 169 | |

### Isolated Nucleic Acid Molecules of the Present Invention

[0478] One aspect of the invention pertains to isolated nucleic acid molecules that encode a polypeptide of the invention or a biologically active portion thereof, as well as nucleic acid molecules sufficient for use as hybridization probes to identify nucleic acid molecules encoding a polypeptide of the invention and fragments of such nucleic acid molecules suitable for use as PCR primers for the amplification or mutation of nucleic acid molecules.

[0479] As described below, one aspect of the invention pertains to isolated nucleic acids comprising nucleotide sequences encoding Delta3 polypeptides, and/or equivalents of such polypeptides or nucleic acids. The “term equivalent” is understood to include nucleotide sequences encoding functionally equivalent Delta3 polypeptides or functionally equivalent peptides having an activity of a Delta3 protein such as described herein. Equivalent nucleotide sequences also include sequences that differ by one or more nucleotide substitutions, additions or deletions, such as allelic variants, and will, therefore, include, for example, sequences that differ from the nucleotide sequence of the Delta3 nucleic acid sequence shown in any of SEQ ID NOs: 1, 3, 24, 26, 27, 29, 31, 33, 35, 37, 39, 41, 43 or 45 due to the degeneracy of the genetic code.

[0480] Another aspect of the invention pertains to isolated nucleic acid molecules that encode FTHMA-070 or T85 proteins or biologically active portions thereof, as well as nucleic acid molecules sufficient for use as hybridization probes to identify FTHMA-070 or T85-encoding nucleic acids (e.g., FTHMA-070 or T85 mRNA) and fragments for use as PCR primers for the amplification or mutation of FTHMA-070 or T85 nucleic acid molecules.

[0481] Another aspect of the invention pertains to isolated nucleic acid molecules that encode Tango-77 proteins or biologically active portions thereof, as well as nucleic acid molecules sufficient for use as hybridization probes to identify Tango-77-encoding nucleic acids (e.g., Tango-77 mRNA) and fragments for use as PCR primers for the amplification or mutation of Tango-77 nucleic acid molecules.

[0482] Yet another aspect of the invention pertains to isolated nucleic acid molecules that encode SPOIL proteins or biologically active portions thereof, as well as nucleic acid fragments sufficient for use as hybridization probes to identify SPOIL-encoding nucleic acids (e.g., SPOIL mRNA) and fragments for use as PCR primers for the amplification or mutation of SPOIL nucleic acid molecules.

[0483] Another aspect of the invention pertains to isolated nucleic acid molecules that encode NEOKINE proteins or biologically active portions thereof, as well as nucleic acid fragments sufficient for use as hybridization probes to identify NEOKINE-encoding nucleic acids (e.g., NEOKINE mRNA) and fragments for use as PCR primers for the amplification or mutation of NEOKINE nucleic acid molecules.

[0484] Another aspect of the invention pertains to isolated nucleic acid molecules that encode T129 proteins or biologically active portions thereof, as well as nucleic acid molecules sufficient for use as hybridization probes to identify T129-encoding nucleic acids (e.g., T129 mRNA) and fragments for use as PCR primers for the amplification or mutation of T129 nucleic acid molecules.

[0485] As used herein, the term “nucleic acid molecule” is intended to include DNA molecules (e.g., cDNA or genomic DNA) and RNA molecules (e.g., mRNA) and analogs of the DNA or RNA generated using nucleotide analogs. The nucleic acid molecule can be single-stranded or double-stranded, but preferably is double-stranded DNA.

[0486] An “isolated” nucleic acid molecule is one which is separated from other nucleic acid molecules which are present in the natural source of the nucleic acid. Preferably, an “isolated” nucleic acid is free of sequences (preferably protein encoding sequences) which naturally flank the nucleic acid (i.e., sequences located at the 5′ and 3′ ends of the nucleic acid) in the genomic DNA of the organism from which the nucleic acid is derived. For example, in various embodiments, the isolated FTHMA-070, T85, Tango 77, SPOIL, NEOKINE, T129 or A259 nucleic acid molecule can contain less than about 5 kb, 4 kb, 3 kb, 2 kb, 1 kb, 0.5 kb or 0.1 kb of nucleotide sequences which naturally flank the nucleic acid molecule in genomic DNA of the cell from which the nucleic acid is derived. Moreover, an “isolated” nucleic acid molecule, such as a cDNA molecule, can be substantially free of other cellular material, or culture medium when produced by recombinant techniques, or substantially free of chemical precursors or other chemicals when chemically synthesized.

[0487] A nucleic acid molecule of the present invention, e.g., a nucleic acid molecule having the nucleotide sequence of SEQ ID NOs: 1, 3, 24, 26, 27, 29, 31, 33, 35, 37, 39, 41, 43, 45, 53, 55, 57, 58, 71, 73, 76, 80, 89, 101, 104, 112, 115, 118, 121, 124, 137, 139, 145, 146, 163 or 164 or the nucleotide sequence of the cDNA of a clone deposited with the ATCC® as Accession Number 98348, 98807, 98883, 98984 or 98751 or a complement thereof, can be isolated using standard molecular biology techniques and the sequence information provided herein. Using all or a portion of the nucleic acid sequences of SEQ ID NOs: 1, 3, 24, 26, 27, 29, 31, 33, 35, 37, 39, 41, 43, 45, 53, 55, 57, 58, 71, 73, 76, 80, 89, 101, 104, 112, 115, 118, 121, 124, 137, 139, 145, 146, 163 or 164, or the nucleotide sequence of the cDNA of a clone deposited with the ATCC® as Accession Number 98348, 98807, 98883, 98984 or 98751, as a hybridization probe, nucleic acid molecules of the invention can be isolated using standard hybridization and cloning techniques (e.g., as described in Sambrook et al., eds., Molecular Cloning: A Laboratory Manual, 2nd ed., Cold Spring Harbor Laboratory, Cold Spring Harbor Laboratory Press, Cold Spring Harbor, N.Y., 1989).

[0488] In another embodiment, a portion of the nucleic acid sequence of SEQ ID NO:89, for example, from nucleotides 1 to 15 or from nucleotides 447 or 495 to 746, can used as a hybridization probe. In yet another embodiment, a portion of the nucleic acid sequence of SEQ ID NO:101, for example, from nucleotides 1 to 280 or from nucleotides 390 to 1291, can be used as a hybridization probe. In yet another embodiment, a portion of the nucleic acid sequence of SEQ ID NO:106, for example, from nucleotides 1-371 or from 481-1377, can be used as a hybridization probe. In yet another embodiment, a portion of the nucleic acid sequence of SEQ ID NO:112, for example, from nucleotides 225-364, from 96-575, or from 495-838, can be used as a hybridization probe.

[0489] Moreover, a nucleic acid molecule encompassing all or a portion of SEQ ID NO:89, SEQ ID NO:101, SEQ ID NO:104, SEQ ID NO:112, the DNA insert of the plasmid deposited with ATCC as Accession Number 98883, or the DNA insert of the plasmid deposited with ATCC as Accession Number 98984, can be isolated by the polymerase chain reaction (PCR) using synthetic oligonucleotide primers designed based upon the sequence of SEQ ID NO:89, SEQ ID NO:101, SEQ ID NO:104, SEQ ID NO:112, the DNA insert of the plasmid deposited with ATCC as Accession Number 98883, or the DNA insert of the plasmid deposited with ATCC as Accession Number 98984.

[0490] Moreover, a nucleic acid molecule encompassing all or a portion of SEQ ID NO:115, SEQ ID NO:118, SEQ ID NO:121, SEQ ID NO:124, or the nucleotide sequence of the DNA insert of the plasmid deposited with ATCC as Accession Number 98751, can be isolated by the polymerase chain reaction (PCR) using synthetic oligonucleotide primers designed based upon the sequence of SEQ ID NO:115, SEQ ID NO:118, SEQ ID NO:121, SEQ ID NO:124, or the nucleotide sequence of the DNA insert of the plasmid deposited with ATCC as Accession Number 98751.

[0491] A nucleic acid molecule of the invention can be amplified using cDNA, mRNA or genomic DNA as a template and appropriate oligonucleotide primers according to standard PCR amplification techniques. The nucleic acid so amplified can be cloned into an appropriate vector and characterized by DNA sequence analysis. Furthermore, oligonucleotides corresponding to all or a portion of a nucleic acid molecule of the invention can be prepared by standard synthetic techniques, e.g., using an automated DNA synthesizer.

[0492] In another preferred embodiment, an isolated nucleic acid molecule of the invention comprises a nucleic acid molecule which is a complement of the nucleotide sequence of SEQ ID NOs: 1, 3, 24, 26, 27, 29, 31, 33, 35, 37, 39, 41, 43, 45, 53, 55, 57, 58, 71, 73, 76, 80, 137, 139, 145, 146, 163 or 164, or the nucleotide sequence of the cDNA of a clone deposited with the ATCC® as Accession Number 98348, or 98807, or a portion thereof. A nucleic acid molecule which is complementary to a given nucleotide sequence is one which is sufficiently complementary to the given nucleotide sequence that it can hybridize to the given nucleotide sequence under the conditions set forth herein, thereby forming a stable duplex.

[0493] In a preferred embodiment, an isolated nucleic acid molecule of the invention comprises the nucleotide sequence shown in SEQ ID NO:91. The sequence of SEQ ID NO:91 corresponds to murine SPOIL-I cDNA. This cDNA comprises sequences encoding the murine SPOIL-I protein (i.e., “the coding region”, from nucleotides 135-428 of SEQ ID NO:89).

[0494] In another preferred embodiment, an isolated nucleic acid molecule of the invention comprises the nucleotide sequence shown in SEQ ID NO:92. The sequence of SEQ ID NO:92 corresponds to murine SPOIL-I cDNA. This cDNA comprises sequences encoding the mature SPOIL-I protein (i.e., from nucleotides 186-428 of SEQ ID NO:89 after the signal sequence has been cleaved).

[0495] In yet another embodiment, an isolated nucleic acid molecule of the invention comprises the nucleotide sequence shown in SEQ ID NO:89. The sequence of SEQ ID NO:89 corresponds coding and noncoding regions of murine SPOIL-I cDNA. This cDNA comprises sequences encoding the murine SPOIL-I protein (i.e., “the coding region”, from nucleotides 135-428) and noncoding regions (i.e., from nucleotides 1-134 and from nucleotides 429-746).

[0496] In yet another embodiment, an isolated nucleic acid molecule of the invention comprises the nucleotide sequence shown in SEQ ID NO:112. The sequence of SEQ ID NO:112 corresponds coding and noncoding regions of murine SPOIL-II cDNA. This cDNA comprises sequences encoding the murine SPOIL-II protein (i.e., “the coding region”, from nucleotides 96-575) and noncoding regions (i.e., from nucleotides 1-95 and from nucleotides 576-838).

[0497] In another preferred embodiment, an isolated nucleic acid molecule of the invention comprises the nucleotide sequence shown in SEQ ID NO:101. The sequence of SEQ ID NO:101 corresponds to the human SPOIL-I cDNA. This cDNA comprises sequences encoding the human SPOIL-I protein (i.e., “the coding region”, from nucleotides 124 to 630), as well as 5′ untranslated sequences (nucleotides 1 to 123) and 3′ untranslated sequences (nucleotides 631 to 1291). Alternatively, the nucleic acid molecule can comprise only the coding region of SEQ ID NO:101 (e.g., nucleotides 124 to 630).

[0498] In another preferred embodiment, an isolated nucleic acid molecule of the invention comprises the nucleotide sequence shown in SEQ ID NO:104. The sequence of SEQ ID NO:104 corresponds to the human SPOIL-II cDNA. This cDNA comprises sequences encoding the human SPOIL-II protein (i.e., “the coding region”, from nucleotides 98-721, as well as 5′ untranslated sequences (nucleotides 1-97 and 3′ untranslated sequences (nucleotides 722-1377). Alternatively, the nucleic acid molecule can comprise only the coding region of SEQ ID NO:104 (e.g., nucleotides 98-721).

[0499] In another preferred embodiment, an isolated nucleic acid molecule of the invention comprises a nucleic acid molecule which is a complement of the nucleotide sequence shown in SEQ ID NO:89, SEQ ID NO:101, SEQ ID NO:104, SEQ ID NO:112, the DNA insert of the plasmid deposited with ATCC as Accession Number 98883, or the DNA insert of the plasmid deposited with ATCC as Accession Number 98984, or a portion of any of these nucleotide sequences. A nucleic acid molecule which is complementary to the nucleotide sequence shown in SEQ ID NO:89, SEQ ID NO:101, SEQ ID NO:104, SEQ ID NO:112, the DNA insert of the plasmid deposited with ATCC as Accession Number 98883, or the DNA insert of the plasmid deposited with ATCC as Accession Number 98984, is one which is sufficiently complementary to the nucleotide sequence shown in SEQ ID NO:89, SEQ ID NO:101, SEQ ID NO:104, SEQ ID NO:112, the DNA insert of the plasmid deposited with ATCC as Accession Number 98883, or the DNA insert of the plasmid deposited with ATCC as Accession Number 98984, such that it can hybridize to the nucleotide sequence shown in SEQ ID NO:89, SEQ ID NO:101, SEQ ID NO:104, SEQ ID NO:112, the DNA insert of the plasmid deposited with ATCC as Accession Number 98883, or the DNA insert of the plasmid deposited with ATCC as Accession Number 98984, or a complement thereof, thereby forming a stable duplex.

[0500] In still another preferred embodiment, an isolated nucleic acid molecule of the present invention comprises a nucleotide sequence which is at least about 50-55%, 60-65%, preferably at least about 70-75%, more preferable at least about 80-85%, and even more preferably at least about 90-95% or more identical to the nucleotide sequences shown in SEQ ID NO:89, the nucleotide sequence shown in SEQ ID NO:101, the nucleotide sequence shown in SEQ ID NO:104, the nucleotide sequence shown in SEQ ID NO:112, the nucleotide sequence of the DNA insert of the plasmid deposited with ATCC as Accession Number 98883, the DNA insert of the plasmid deposited with ATCC as Accession Number 98984, or a portion of any of these nucleotide sequences.

[0501] In a preferred embodiment, an isolated nucleic acid molecule of the invention comprises the nucleotide sequence shown in SEQ ID NO:115. The sequence of SEQ ID NO:115 corresponds to the human NEOKINE-1 cDNA. This cDNA comprises sequences encoding the human NEOKINE-1 protein (i.e., “the coding region”, from nucleotides 97-393), as well as 5′ untranslated sequences (nucleotides 1-97) and 3′ untranslated sequences (nucleotides 394-1564). Alternatively, the nucleic acid molecule can comprise only the coding region of SEQ ID NO:115 (e.g., nucleotides 97-393, corresponding to SEQ ID NO:117).

[0502] In another preferred embodiment, an isolated nucleic acid molecule of the invention comprises the nucleotide sequence shown in SEQ ID NO:118. The sequence of SEQ ID NO:118 corresponds to a murine NEOKINE-1 cDNA. This cDNA comprises sequences encoding the murine NEOKINE-1 protein (i.e., “the coding region”, from nucleotides 212-508), as well as 5′ untranslated sequences (nucleotides 1-211) and 3′ untranslated sequences (nucleotides 509-1656). Alternatively, the nucleic acid molecule can comprise only the coding region of SEQ ID NO:118 (e.g., nucleotides 212-508, corresponding to SEQ ID NO:120).

[0503] In another preferred embodiment, an isolated nucleic acid molecule of the invention comprises the nucleotide sequence shown in SEQ ID NO:121. The sequence of SEQ ID NO:121 corresponds to a rat NEOKINE-1 cDNA. This cDNA comprises sequences encoding at least 79 amino acid residues of the rat NEOKINE-1 protein (i.e., “the coding region”, from nucleotides 1-234), as well as 3′ untranslated sequences (nucleotides 235-1372). Alternatively, the nucleic acid molecule can comprise only the coding region of SEQ ID NO:121 (e.g., nucleotides 235-1372, corresponding to SEQ ID NO:123).

[0504] In another preferred embodiment, an isolated nucleic acid molecule of the invention comprises the nucleotide sequence shown in SEQ ID NO:124. The sequence of SEQ ID NO:124 corresponds to a macaque NEOKINE-1 cDNA. This cDNA comprises sequences encoding at least 94 amino acid residues of the macaque NEOKINE-1 protein (i.e., “the coding region”, from nucleotides 3-284), as well as 3′ untranslated sequences (nucleotides 285-1458). Alternatively, the nucleic acid molecule can comprise only the coding region of SEQ ID NO:124 (e.g., nucleotides 285-1458, corresponding to SEQ ID NO:136).

[0505] In another preferred embodiment, an isolated nucleic acid molecule of the invention comprises a nucleic acid molecule which is a complement of the nucleotide sequence shown in SEQ ID NO:115, SEQ ID NO:118, SEQ ID NO:121, SEQ ID NO:124, or the nucleotide sequence of the DNA insert of the plasmid deposited with ATCC as Accession Number 98751, or a portion of any of these nucleotide sequences. A nucleic acid molecule which is complementary to the nucleotide sequence shown in SEQ ID NO:115, SEQ ID NO:118, SEQ ID NO:121, SEQ ID NO:124, or the nucleotide sequence of the DNA insert of the plasmid deposited with ATCC as Accession Number 98751, is one which is sufficiently complementary to the nucleotide sequence shown in SEQ ID NO:115, SEQ ID NO:118, SEQ ID NO:121, SEQ ID NO:124, or the nucleotide sequence of the DNA insert of the plasmid deposited with ATCC as Accession Number 98751, such that it can hybridize to the nucleotide sequence shown in SEQ ID NO:115, SEQ ID NO:118, SEQ ID NO:121, SEQ ID NO:124, or the nucleotide sequence of the DNA insert of the plasmid deposited with ATCC as Accession Number 98751, thereby forming a stable duplex.

[0506] In still another preferred embodiment, an isolated nucleic acid molecule of the present invention comprises a nucleotide sequence which is at least about 60-65%, preferably at least about 70-75%, more preferable at least about 80-85%, and even more preferably at least about 90-95%, 96-97%, 98-99% or more homologous to the nucleotide sequences shown in SEQ ID NO:115, SEQ ID NO:118, SEQ ID NO:121, SEQ ID NO:124, or the nucleotide sequence of the DNA insert of the plasmid deposited with ATCC as Accession Number 98751, or a portion of any of these nucleotide sequences.

[0507] Moreover, a nucleic acid molecule of the invention can comprise only a portion of a nucleic acid sequence encoding a full-length polypeptide of the invention for example, a fragment which can be used as a probe or primer or a fragment encoding a biologically active portion of a polypeptide of the invention. The nucleotide sequence determined from the cloning one gene allows for the generation of probes and primers designed for use in identifying and/or cloning homologs in other cell types, e.g., from other tissues, as well as homologs from other mammals. The probe/primer typically comprises substantially purified oligonucleotide.

[0508] The oligonucleotide typically comprises a region of nucleotide sequence that hybridizes under stringent conditions to at least about 12, preferably about 25, more preferably about 50, 75, 100, 125, 150, 175, 200, 250, 300, 350 or 400 consecutive nucleotides of the sense or anti-sense sequence of SEQ ID NOs: 1, 3, 24, 26, 27, 29, 31, 33, 35, 37, 39, 41, 43 or 45, or the nucleotide sequence of the cDNA of a clone deposited with the ATCC® as Accession Number 98348, or of a naturally-occurring mutant of SEQ ID NOs: 1, 3, 24, 26, 27, 29, 31, 33, 35, 37, 39, 41, 43 or 45, or the nucleotide sequence of the cDNA of a clone deposited with the ATCC® as Accession Number 98348.

[0509] The oligonucleotide typically comprises a region of nucleotide sequence that hybridizes under stringent conditions to at least about 12, preferably about 25, more preferably about 50, 75, 100, 125, 150, 175, 200, 250, 300, 350 or 400 consecutive nucleotides of the sense or anti-sense sequence of SEQ ID NO:53, SEQ ID NO:55, SEQ ID NO:57, SEQ ID NO:58, or of a naturally occurring mutant of SEQ ID NO:53, SEQ ID NO:55, SEQ ID NO:57, SEQ ID NO:58.

[0510] The oligonucleotide typically comprises a region of nucleotide sequence that hybridizes under stringent conditions to at least about 12, preferably about 25, more preferably about 50, 75, 100, 125, 150, 175, 200, 250, 300, 350 or 400 consecutive nucleotides of the sense or anti-sense sequence of SEQ ID NO:71, SEQ ID NO:73, SEQ ID NO:76, SEQ ID NO:80, or the cDNA of ATCC 98807. Alternatively, the oligonucleotide can typically comprise a region of nucleotide sequence that hybridizes under stringent conditions to at least about 12, preferably about 25, more preferably about 50, 75, 100, 125, 150, 175, 200, 250, 300, 350 or 400 consecutive nucleotides of the sense or anti-sense sequence of a naturally occurring mutant of SEQ ID NO:71, SEQ ID NO:73, SEQ ID NO:76, SEQ ID NO:80, or the cDNA of ATCC 98807.

[0511] The oligonucleotide typically comprises a region of nucleotide sequence that hybridizes under stringent conditions to at least about 12, preferably about 25, more preferably about 40, 50 or 75 consecutive nucleotides of a sense sequence of SEQ ID NO:89, SEQ ID NO:101, SEQ ID NO:104, SEQ ID NO:112, the DNA insert of the plasmid deposited with ATCC as Accession Number 98883, or the DNA insert of the plasmid deposited with ATCC as Accession Number 98984, of an anti-sense sequence of SEQ ID NO:89, SEQ ID NO:101, SEQ ID NO:104, SEQ ID NO:112, the DNA insert of the plasmid deposited with ATCC as Accession Number 98883, or the DNA insert of the plasmid deposited with ATCC as Accession Number 98984, or of a naturally occurring mutant of either SEQ ID NO:89, SEQ ID NO:101, SEQ ID NO:104, SEQ ID NO:112, the DNA insert of the plasmid deposited with ATCC as Accession Number 98883, or the DNA insert of the plasmid deposited with ATCC as Accession Number 98984.

[0512] The oligonucleotide typically comprises a region of nucleotide sequence that hybridizes under stringent conditions to at least about 12, preferably about 25, more preferably about 40, 50 or 75 consecutive nucleotides of a sense sequence of SEQ ID NO:115, SEQ ID NO:118, SEQ ID NO:121, SEQ ID NO:124, or the nucleotide sequence of the DNA insert of the plasmid deposited with ATCC as Accession Number 98751, of an anti-sense sequence of SEQ ID NO:115, SEQ ID NO:118, SEQ ID NO:121, SEQ ID NO:124, or the nucleotide sequence of the DNA insert of the plasmid deposited with ATCC as Accession Number 98751, or of a naturally occurring mutant of SEQ ID NO:115, SEQ ID NO:118, SEQ ID NO:121, SEQ ID NO:124, or the nucleotide sequence of the DNA insert of the plasmid deposited with ATCC as Accession Number 98751. In an exemplary embodiment, a nucleic acid molecule of the present invention comprises a nucleotide sequence which is greater that 500 nucleotides in length and hybridizes under stringent hybridization conditions to a nucleic acid molecule of SEQ ID NO:115, SEQ ID NO:118, SEQ ID NO:121, SEQ ID NO:124, or the nucleotide sequence of the DNA insert of the plasmid deposited with ATCC as Accession Number 98751.

[0513] The oligonucleotide typically comprises a region of nucleotide sequence that hybridizes under stringent conditions to at least about 12, preferably about 25, more preferably about 50, 75, 100, 125, 150, 175, 200, 250, 300, 350 or 400 consecutive nucleotides of the sense or anti-sense sequence of SEQ ID NO:137 or SEQ ID NO:139, or of a naturally occurring mutant of SEQ ID NO:137 or SEQ ID NO:139.

[0514] The oligonucleotide typically comprises a region of nucleotide sequence that hybridizes under stringent conditions to at least about 12, preferably about 25, more preferably about 50, 75, 100, 125, 150, 175, 200, 250, 300, 350 or 400 consecutive nucleotides of the sense or anti-sense sequence of SEQ ID NO:145, 146, 163, or 164 or of a naturally occurring mutant of SEQ ID NO: 145, 146, 163, or 164.

[0515] Probes based on the sequence of a nucleic acid molecule of the invention can be used to detect transcripts or genomic sequences encoding the same protein molecule encoded by a selected nucleic acid molecule. The probe comprises a label group attached thereto, e.g., a radioisotope, a fluorescent compound, an enzyme, or an enzyme co-factor. Such probes can be used as part of a diagnostic test kit for identifying cells or tissues which mis-express the protein, such as by measuring levels of a nucleic acid molecule encoding the protein in a sample of cells from a subject, e.g., detecting mRNA levels or determining whether a gene encoding the protein has been mutated or deleted.

[0516] A nucleic acid fragment encoding a biologically active portion of a polypeptide of the invention can be prepared by isolating a portion of any of SEQ ID NOs: 2, 25, 28, 30, 32, 34, 36, 38, 40, 42, 44 or 46, or the amino acid sequence encoded by the cDNA of a clone deposited with the ATCC® as Accession Number 98348 expressing the encoded portion of the polypeptide protein (e.g., by recombinant expression in vitro) and assessing the activity of the encoded portion of the polypeptide.

[0517] A nucleic acid fragment encoding a “biologically active portion of FTHMA-070, Tango85, Tango77, SPOIL, NEOKINE, Tango129 or A259” can be prepared by isolating a portion of SEQ ID NO:53, 55, 57, 58, 71, 73, 76, 80, 89, 101, 104, 112, 115, 118, 121, 124, 137, 139, 146 or 164, or the nucleotide sequence of the cDNA of ATCC 98807, 98883, 98984 or 98751, which encodes a polypeptide having a FTHMA-070, Tango85, Tango77, SPOIL, NEOKINE, Tango129 or A259 biological activity, expressing the encoded portion of FTHMA-070, Tango85, Tango77, SPOIL, NEOKINE, Tango129 or A259 protein (e.g., by recombinant expression in vitro) and assessing the activity of the encoded portion of FTHMA-070, Tango85, Tango77, SPOIL, NEOKINE, Tango129 or A259.

[0518] The invention further encompasses nucleic acid molecules that differ from the nucleotide sequence of SEQ ID NOs: 1, 3, 24, 26, 27, 29, 31, 33, 35, 37, 39, 41, 43, 45, 53, 55, 57, 58, 71, 73, 76, 80, 89, 101, 104, 112, 115, 118, 121, 124, 137, 139, 145, 146, 163 or 164, or the nucleotide sequence of the cDNA of a clone deposited with the ATCC® as Accession Number 98348, 98807, 98883, 98984 or 98751, due to degeneracy of the genetic code and thus encode the same protein as that encoded by the nucleotide sequence of SEQ ID NOs: 1, 3, 24, 26, 27, 29, 31, 33, 35, 37, 39, 41, 43, 45, 53, 55, 57, 58, 71, 73, 76, 80, 89, 101, 104, 112, 115, 118, 121, 124, 137, 139, 145, 146, 163 or 164, or the nucleotide sequence of the cDNA of a clone deposited with the ATCC® as Accession Number 98348, 98807, 98883, 98984 or 98751.

[0519] In addition to the nucleotide sequences of SEQ ID NOs: 1, 3, 24, 26, 27, 29, 31, 33, 35, 37, 39, 41, 43, 45, 53, 55, 57, 58, 71, 73, 76, 80, 89, 101, 104, 112, 115, 118, 121, 124, 137, 139, 145, 146, 163 or 164, or the nucleotide sequence of the cDNA of a clone deposited with the ATCC® as Accession Number 98348, 98807, 98883, 98984 or 98751, it will be appreciated by those skilled in the art that DNA sequence polymorphisms that lead to changes in the amino acid sequence may exist within a population (e.g., the human population). Such genetic polymorphisms may exist among individuals within a population due to natural allelic variation.

[0520] Such allelic variants of a polymorphic region of a Delta3 gene are also included as part of the present invention. For example, the human gene for Delta3 was mapped to chromosome 15, between markers D15S1244 and D15S144, and therefore, human Delta3 family members can include nucleotide sequence polymorphisms (e.g., nucleotide sequences that vary from SEQ ID NO: 1,3, 24, 26, 27, 29, 31, 33, 35, or 37) that map to this chromosome 15 region (i.e., between framework regions D15S1244 and D15S144), as well as polypeptides encoded therefrom.

[0521] An allele is one of a group of genes which occur alternatively at a given genetic locus. As used herein, the terms “gene” and “recombinant gene” refer to nucleic acid molecules comprising an open reading frame encoding a Delta3, FTHMA-070, Tango85, Tango77, SPOIL, NEOKINE, Tango129 or A259 protein, preferably a mammalian Delta3, FTHMA-070, Tango85, Tango77, SPOIL, NEOKINE, Tango129 or A259 protein. Such natural allelic variations can typically result in 1-5% variance in the nucleotide sequence of a given gene. Alternative alleles can be identified by sequencing the gene of interest in a number of different individuals. This can be readily carried out by using hybridization probes to identify the same genetic locus in a variety of individuals. Any and all such nucleotide variations and resulting amino acid polymorphisms or variations that are the result of natural allelic variation and that do not alter the functional activity are intended to be within the scope of the invention.

[0522] In addition to naturally-occurring allelic variants of a nucleic acid molecule of the invention sequence that may exist in the population, the skilled artisan will further appreciate that changes can be introduced by mutation thereby leading to changes in the amino acid sequence of the encoded protein, without altering the biological activity of the protein. For example, one can make nucleotide substitutions leading to amino acid substitutions at “non-essential” amino acid residues. A “non-essential” amino acid residue is a residue that can be altered from the wild-type sequence without altering the biological activity, whereas an “essential” amino acid residue is required for biological activity. For example, amino acid residues that are not conserved or only semi-conserved among homologs of various species may be non-essential for activity and thus would be likely targets for alteration. Alternatively, amino acid residues that are conserved among the orthologs of various species (e.g., murine and human) may be essential for activity and thus would not be likely targets for alteration.

[0523] In one embodiment of a nucleotide sequence of human Delta3, the nucleotide at position 786 is an cytosine (C) (SEQ ID NO: 1). In this embodiment, the amino acid at position 150 is a alanine (A) (SEQ ID NO: 2). In an alternative embodiment, a species variant of human Delta3 has a nucleotide at position 786 which is a thymidine (T) (SEQ ID NO: 33). In this embodiment, the amino acid at position 150 is valine (V) (SEQ ID NO: 34), i.e., a conservative substitution.

[0524] In one embodiment of a nucleotide sequence of human Delta3, the nucleotide at position 594 is a cytosine (C) (SEQ ID NO: 1). In this embodiment, the amino acid at position 86 is threonine (T) (SEQ ID NO: 2). In an alternative embodiment, a species variant of human Delta3 has a nucleotide at position 594 which is a guanine (G) (SEQ ID NO: 35). In this embodiment, the amino acid at position 86 is serine (S) (SEQ ID NO: 36), i.e., a conservative substitution.

[0525] In one embodiment of a nucleotide sequence of human Delta3, wherein the nucleotide at position 883 is a thymidine (T) (SEQ ID NO: 1). In this embodiment, the amino acid at position 182 is aspartate (D) (SEQ ID NO: 2). In an alternative embodiment, a species variant of human Delta3 has a nucleotide at position 883 which is an adenine (A) (SEQ ID NO: 37). In this embodiment, the amino acid at position 182 is glutamate (E) (SEQ ID NO: 38), i.e., a conservative substitution.

[0526] In one embodiment of a nucleotide sequence of mouse Delta3, the nucleotide at position 49 is cytosine (C) (SEQ ID NO: 24). In this embodiment, the amino acid at position 4 is alanine (A) (SEQ ID NO: 25). In an alternative embodiment, a species variant of mouse Delta3 has a nucleotide at position 49 which is thymidine (T) (SEQ ID NO: 39). In this embodiment, the amino acid at position 4 is valine (V) (SEQ ID NO: 40), i.e., a conservative substitution.

[0527] In one embodiment of a nucleotide sequence of mouse Delta3, the nucleotide at position 51 is thymidine (T) (SEQ ID NO: 24). In this embodiment, the amino acid at position 5 is serine (S) (SEQ ID NO: 25). In an alternative embodiment, a species variant of mouse Delta3 has a nucleotide at position 51 which is a adenine (A) (SEQ ID NO: 41). In this embodiment, the amino acid at position 5 is threonine (T) (SEQ ID NO: 42), i.e., a conservative substitution.

[0528] In one embodiment of a nucleotide sequence of mouse Delta3, the nucleotide at position 109 is guanine (G) (SEQ ID NO: 24). In this embodiment, the amino acid at position 24 is arginine (R) (SEQ ID NO: 25). In an alternative embodiment, a species variant of mouse Delta3 has a nucleotide at position 109 which is adenine (A) (SEQ ID NO: 43). In this embodiment, the amino acid at position 24 is histidine (H) (SEQ ID NO: 44), i.e., a conservative substitution.

[0529] In one embodiment of a nucleotide sequence of mouse Delta3, wherein the nucleotide at position 130 is a thymidine (T) (SEQ ID NO: 24). In this embodiment, the amino acid at position 31 is phenylalanine (F) (SEQ ID NO: 25). In an alternative embodiment, a species variant of mouse Delta3 has a nucleotide at position 130 which is adenine (A) (SEQ ID NO: 45). In this embodiment, the amino acid at position 31 is tyrosine (Y) (SEQ ID NO: 46), i.e., a conservative substitution.

[0530] The invention also pertains to nucleic acid molecules encoding a polypeptide of the invention that contain changes in amino acid residues that are not essential for activity. Such polypeptides differ in amino acid sequence from SEQ ID NOs: 2, 25, 28, 30, 32, 34, 36, 38, 40, 42, 44 or 46, or the amino acid sequence encoded by the cDNA of a clone deposited with the ATCC® as Accession Number 98348 yet retain biological activity. In one embodiment, the isolated nucleic acid molecule includes a nucleotide sequence encoding a protein that includes an amino acid sequence that is at least 65%, 75%, 85%, 95%, or 98% identical to the amino acid sequence of SEQ ID NOs: 2, 25, 28, 30, 32, 34, 36, 38, 40, 42, 44 or 46, or the amino acid sequence encoded by the cDNA of a clone deposited with the ATCC® as Accession Number 98348.

[0531] Moreover, nucleic acid molecules encoding proteins of the invention from other species (homologs), which have a nucleotide sequence which differs from that of the human protein described herein are intended to be within the scope of the invention. Nucleic acid molecules corresponding to natural allelic variants and homologs of a cDNA of the invention can be isolated based on their identity to the human nucleic acid molecule disclosed herein using the human cDNAs, or a portion thereof, as a hybridization probe according to standard hybridization techniques under stringent hybridization conditions. For example, a cDNA encoding a soluble form of a membrane-bound protein of the invention isolated based on its hybridization to a nucleic acid molecule encoding all or part of the membrane-bound form. Likewise, a cDNA encoding a membrane-bound form can be isolated based on its hybridization to a nucleic acid molecule encoding all or part of the soluble form.

[0532] As used herein, the term “hybridizes under stringent conditions” is intended to describe conditions for hybridization and washing under which nucleotide sequences at least 60% (65%, 70%, preferably 75%) identical to each other typically remain hybridized to each other. Such stringent conditions are known to those skilled in the art and can be found in Current Protocols in Molecular Biology, John Wiley & Sons, N.Y. (1989), 6.3.1-6.3.6. A preferred, non-limiting example of stringent hybridization conditions are hybridization in 6× sodium chloride/sodium citrate (SSC) at about 45° C., followed by one or more washes in 0.2×SSC, 0.1% SDS at 50-65° C. Preferably, an isolated nucleic acid molecule of the invention that hybridizes under stringent conditions to the sequence of SEQ ID NOs: 1, 3, 24, 26, 27, 29, 31, 33, 35, 37, 39, 41, 43, 45, 53, 55, 57, 58, 71, 73, 76, 80, 89, 101, 104, 112, 115, 118, 121, 124, 137, 139, 145, 146, 163 or 164, or the cDNA of ATCC® as Accession Number 98348, 98807, 98883, 98984 or 98751 corresponds to a naturally-occurring nucleic acid molecule. As used herein, a “naturally-occurring” nucleic acid molecule refers to an RNA or DNA molecule having a nucleotide sequence that occurs in nature (e.g., encodes a natural protein).

[0533] Accordingly, in another embodiment, an isolated nucleic acid molecule of the invention is at least 480 (500, 550, 600, 650, 700, 800, 900, 1000, 1100, 1200, 1300, 1400, 1500, 1600, 1700, 1800, 1900, 2000 or 2050) nucleotides in length and hybridizes under stringent conditions to the nucleic acid molecule comprising the nucleotide sequence, preferably the coding sequence, of SEQ ID NOs: 1, 3, 24, 26, 27, 29, 31, 33, 35, 37, 39, 41, 43 or 45, or the nucleotide sequence of the cDNA of a clone deposited with the ATCC® as Accession Number 98348, or complement thereof.

[0534] Accordingly, in another embodiment, an isolated nucleic acid molecule of the invention is at least 300 (325, 350, 375, 400, 425, 450, 500, 550, 600, 650, 700, 800, 900, 1000, or 1290) nucleotides in length and hybridizes under stringent conditions to the nucleic acid molecule comprising the nucleotide sequence, preferably the coding sequence, of SEQ ID NO:53, 55, 57 or 58.

[0535] Accordingly, in another embodiment, an isolated nucleic acid molecule of the invention is at least 300 (325, 350, 375, 400, 425, 450, 500, 550, 600, 650, 700, 800, or 989) nucleotides in length and hybridizes under stringent conditions to the nucleic acid molecule comprising the nucleotide sequence, preferably the coding sequence, of SEQ ID NO:71, 73, 76, 80, or the cDNA of ATCC 98807.

[0536] Accordingly, in another embodiment, an isolated nucleic acid molecule of the invention is at least 15 nucleotides in length and hybridizes under stringent conditions to the nucleic acid molecule comprising the nucleotide sequence of SEQ ID NO:89, 101, 104, 112 or the DNA insert of the plasmid deposited with ATCC as Accession Number 98883 or 98984, or a complement thereof. In other embodiments, the nucleic acid is at least 30, 50, 100, 250, 300, 400, 500, 600 or 700 nucleotides in length.

[0537] Accordingly, in another embodiment, an isolated nucleic acid molecule of the invention is at least 15 nucleotides in length and hybridizes under stringent conditions to the nucleic acid molecule comprising the nucleotide sequence of SEQ ID NO:115, 118, 121, 124, or the nucleotide sequence of the DNA insert of the plasmid deposited with ATCC as Accession Number 98751. In other embodiment, the nucleic acid is at least 30, 50, 100, 250 or 500 nucleotides in length.

[0538] Accordingly, in another embodiment, an isolated nucleic acid molecule of the invention is at least 300 (325, 350, 375, 400, 425, 450, 500, 550, 600, 650, 700, 800, 900, 1000, or 1290) nucleotides in length and hybridizes under stringent conditions to the nucleic acid molecule comprising the nucleotide sequence, preferably the coding sequence, of SEQ ID NO:137 or 139

[0539] Accordingly, in another embodiment, an isolated nucleic acid molecule of the invention is at least 400 (450, 500, 550, 600, 650, 700, 800, 900, 1000, 2000, or 3000) nucleotides in length and hybridizes under stringent conditions to the nucleic acid molecule comprising the nucleotide sequence, preferably the coding sequence, of SEQ ID NO:145 or 163, or a complement thereof.

[0540] Preferably, such nucleic acid molecules, “specifically hybridize” or “specifically detect” a nucleic acid molecule of the invention by exhibiting the ability to hybridize to at least approximately 6, 12, 20, 30, 50, 100, 150, 200, 300, 350, 400 or 425 consecutive nucleotides of a Delta3 nucleotide sequence designated in one of SEQ ID Nos:1, 3, 24, 26, 27, 29, 31, 33, 35, 37, 39, 41, 43 or 45, or the nucleotide sequence of the cDNA of a clone deposited with the ATCC® as Accession Number 98348, or a sequence complementary thereto, such that more than 5, 10 or 20 times more hybridization (utilizing hybridization conditions described above), preferably more than 50 times more hybridization, and even more preferably more than 100 times more hybridization than occurs relative to hybridization to a cellular nucleic acid (e.g., mRNA or genomic DNA) encoding a protein other than a Delta3 protein as defined herein.

[0541] Delta3 nucleic acids can encode polypeptides that are at least 55% identical to an amino acid sequence of SEQ ID NOs: 2, 25, 28, 30, 32, 34, 36, 38, 40, 42, 44 or 46, or the amino acid sequence encoded by the cDNA of a clone deposited with the ATCC® as Accession Number 98348. Nucleic acids which encode polypeptides which are at least about 72%, and even more preferably at least about 80%, 85%, 90%, 95%, or 98% similar with an amino acid sequence represented in SEQ ID NO: 2, 25, 28, 30, 32, 34, 36, 38, 40, 42, 44 or 46, or the amino acid sequence encoded by the cDNA of a clone deposited with the ATCC® as Accession Number 98348 are also within the scope of the invention.

[0542] In one embodiment, the nucleic acid of the present invention encodes a polypeptide having an overall amino acid sequence similarity of at least about 72%, at least about 80%, at least about 85%, at least about 90%, at least about 95%, at least about 98%, or at least about 99% with the amino acid sequence shown in SEQ ID NOs: 2, 25, 28, 30, 32, 34, 36, 38, 40, 42, 44 or 46. In a preferred embodiment, the nucleic acid encodes a protein comprising the amino acid set forth in SEQ ID NOs: 2, 25, 28, 30, 32, 34, 36, 38, 40, 42, 44 or 46, or the amino acid sequence encoded by the cDNA of a clone deposited with the ATCC® as Accession Number 98348. Preferably, the nucleic acid includes all or a portion of the nucleotide sequence corresponding to the coding region of SEQ ID Nos: 1, 3, 24, 26, 27, 29, 31, 33, 35, 37, 39, 41, 43 or 45, or the nucleotide sequence of the cDNA of a clone deposited with the ATCC® as Accession Number 98348.

[0543] The nucleic acids of the invention can encode a Delta3 protein from any species, including insects. Preferred nucleic acids encode vertebrate Delta3 proteins. Even more preferred nucleic acids encode mammalian Delta3 proteins including primate Delta3 proteins, e.g., human Delta3 proteins, and murine Delta3 proteins. Other nucleic acids of the invention can encode avian, equine, canine, feline, bovine or porcine Delta3 proteins.

[0544] In a preferred embodiment of the invention, the nucleic acid encodes a polypeptide comprising an extracellular domain of Delta3, e.g., human or mouse Delta3 including allelic variants having SEQ ID NOs: 2, 25, 28, 30, 32, 34, 36, 38, 40, 42, 44 or 46, or the amino acid sequence encoded by the cDNA of a clone deposited with the ATCC® as Accession Number 98348. Accordingly, preferred nucleic acids encode a polypeptide comprising about amino acid 1 to about amino acid 529 of SEQ ID NO: 2, 28, 30, 32, 34, 36 or 38, or alternatively about amino acid 1 to about amino acid 530 of SEQ ID NO: 25, 40, 42, 44, or 46.

[0545] Other preferred nucleic acids encode a polypeptide corresponding to an extracellular domain of Delta3 lacking the signal peptide, e.g., a polypeptide comprising about amino acid 18 to about amino acid 529 of SEQ ID NO: 2 or about amino acid 18 to about amino acid 530 of SEQ ID NO: 25. Yet other preferred nucleic acids encode a polypeptide comprising at least one of the conserved motifs in the extracellular domain of Delta3, e.g., a DSL motif (for example, amino acids 173-217 of SEQ ID NO: 2 or amino acids 174-218 of SEQ ID NO: 25) or an EGF-like motif (for example, EGF-like 1, amino acids 222-250 of SEQ ID NO: 2), or also for example amino acids 223-251 of SEQ ID NO: 25. Additional EGF-like domains are from amino acids 253-281, 288-321, 328-359, 366-399, 411-437, 444-475, and 484-517 of SEQ ID NO: 2 and 254-282, 289-322, 329-360, 367-400, 412-438, 445-476, and 485-518 of SEQ ID NO: 25.

[0546] In one embodiment, the nucleic acid encodes a protein having at least one EGF-like motif. In other embodiments, the nucleic acid encodes proteins having at least 2, at least 3, at least 4, at least 5, at least 6, at least 7, or 8 EGF-like domains or amino acids 223-251, 254-282, 289-322, 329-360, 367-400, 412-438, 445-476, and 485-518 of SEQ ID NO: 25.

[0547] The polypeptide encoded by a nucleic acid encoding any of these numbers of EGF-like domains can further comprise an amino acid sequence encoding a DSL motif.

[0548] The DSL region or motif is shared by all known members of the family of presumed ligands of Notch-like proteins (Delta1 and Serrate in Drosophila; Lag-2 and Apx-1 in Caenorhabditis elegans) (Henderson et al. (1994) Development 120:2913; Tax et al. (1994) Nature 368:150; Fleming et al. (1990) Genes Dev. 4:2188; Thomas et al. (1991) Development 11:749; Mello et al. (1994) Cell 77:95). The DSL motif is located in the amino terminal portion of the protein, i.e., extracellular, which is closely related to a similar domain in the Drosophila Delta1 protein and which has been described as being necessary and sufficient for in vitro binding to Notch (Henrique et al. (1995) Nature 375:787; Muskavitch (1994) Dev. Biol. 166:415).

[0549] In one embodiment, a nucleic acid of the invention encodes a polypeptide that comprises a human or mouse Delta3 DSL domain and which is capable of binding a receptor. A Delta3 DSL domain conforms to the following DSL consensus sequence: X-X-C-X-X-X-Y-[FY]-G-X-X-C-X-X-X-C-[HR]-X-R-X-D-X-F-G-[RH]-X-X-C-X-X-X-G-X-X-X-C-X-X-X-C-X-X-G-W-X-G-X-Y-C (SEQ ID NO:23), wherein all amino acids are indicated according to their universal single letter designation, brackets indicate that the amino acid at that position is selected from one of the amino acids within the brackets, and “X” designates any amino acid, and wherein the DSL domain is at least 60%, or more preferably at least 65%, 70%, 75%, 80%, 85%, or most preferably 90%, 95%, 98% or 100% identical, i.e., no gaps in the sequence, to the human Delta3 polypeptide sequence from amino acids 173-217 of SEQ ID NO:2. In another embodiment, a Delta3 DSL domain conforms to the above-described DSL consensus sequence and is at least 60%, or more preferably at least 65%, 70%, 75%, 80%, 85%, or most preferably 90%, 95%, 98% or 100% identical to the mouse Delta3 DSL sequence from amino acids 174-218 of SEQ ID NO: 25.

[0550] In another embodiment, a nucleic acid of the invention encodes Delta3 DSL domain has a cysteine at amino acid positions 176, 185, 189, 201, 209, and 217 of SEQ ID NO: 2, and is at least 60%, or more preferably at least 65%, 70%, 75%, 80%, 85%, or most preferably 90%, 95%, 98% or 100% identical to the human Delta3 polypeptide sequence from amino acids 173-217 of SEQ ID NO:2. In another embodiment, a Delta3 DSL domain has a cysteine at amino acid positions 177, 186, 190, 202, 210, and 218 of SEQ ID NO: 25, and is at least 60%, or more preferably at least 65%, 70%, 75%, 80%, 85%, or most preferably 90%, 95%, 98% or 100% identical to the mouse Delta3 DSL sequence from amino acids 174-218 of SEQ ID NO: 25.

[0551] In one embodiment, a nucleic acid of the invention encodes a polypeptide that comprises a human or mouse Delta3 EGF-like domain. An EGF-like domain has the following consensus sequence: C-X₄₋₈-C-X₁₋₂-G-X-C-X₅₋₉-[WFY]-X-C-X-C-X₂₋₄-G-[WFY]-G-X₁₋₃-[FY]-C (SEQ ID NO:52), wherein all amino acids are indicated according to their universal single letter designation, brackets indicate that the amino acid at that position is selected from one of the amino acids within the brackets, and “X” designates any amino acid. The numbers in subscript next to an amino acid position indicate a range of possible amino acids, for example, C-X₅₋₉-C indicates that there is a cysteine followed by any 5 to 9 amino acids followed by a cysteine. In one embodiment, an EGF-like domain of the invention is at least 75%, or more preferably at least 80%, 85%, or most preferably 90%, 95%, 98% or 100% identical, i.e., no gaps in the sequence, to the human Delta3 polypeptide sequence from amino acids 222-250, amino acids 253-281, amino acids 288-321, amino acids 328-359, amino acids 366-399, amino acids 411-437, amino acids 444-475, and amino acids 484-517 of SEQ ID NO: 2. In another preferred embodiment, a Delta3 EGF-like domain conforms to the above-described EGF-like consensus sequence and is at least 60%, or more preferably at least 75%, 80%, 85%, or most preferably 90%, 95%, 98% or 100% identical to the mouse Delta3 DSL sequence from amino acids 223-251, amino acids 254-282, amino acids 289-322, amino acids 329-360, amino acids 367-400, amino acids 412-438, amino acids 445-476, and amino acids 485-518 of SEQ ID NO: 25.

[0552] In another embodiment, a nucleic acid of the invention encodes Delta3 EGF-like domain is at least 75%, or more preferably at least 80%, 85%, or most preferably 90%, 95%, 98% or 100% identical to the human Delta3 polypeptide sequence from amino acids 222-250, amino acids 253-281, amino acids 288-321, amino acids 328-359, amino acids 366-399, amino acids 411-437, amino acids 444-475, or amino acids 484-517 of SEQ ID NO: 2. In another embodiment, a Delta3 EGF-like domain is at least 75%, or more preferably at least 80%, 85%, or most preferably 90%, 95%, 98% or 100% identical to the mouse Delta3 EGF-like domain sequence from amino acids 223-251, amino acids 254-282, amino acids 289-322, amino acids 329-360, amino acids 367-400, amino acids 412-438, amino acids 445-476, or amino acids 485-518 of SEQ ID NO: 25.

[0553] Polypeptides encoded by any of the above-described nucleic acids can be soluble. Preferred soluble peptides comprise at least a portion of the extracellular domain of a Delta3 protein. Even more preferred soluble polypeptides comprise an amino acid sequence corresponding to about amino acid 1 to about amino acid 529 of SEQ ID NO: 2, corresponding to about amino acid 18 to about amino acid 529 of SEQ ID NO: 2 or a homolog thereof. Alternatively, an extracellular domain is comprised of about amino acid 1 to about amino acid 530 of SEQ ID NO: 25, about amino acid 18 to about amino acid 530 of SEQ ID NO: 25 or a homolog thereof.

[0554] Yet other preferred soluble Delta3 polypeptides comprise at least one EGF-like domain. Such polypeptides may in addition comprise a DSL domain and optionally a signal peptide.

[0555] In another embodiment, nucleic acids encode a Delta3 polypeptide as part of a fusion protein. A preferred fusion protein is a Delta3 Immunoglobulin (Ig) fusion protein, or alternatively, a Delta3 portion as described above fused to Ig. Such fusion proteins can comprise at least a portion of the extracellular domain of a Delta3 domain. A portion can be any portion of at least about 10 amino acids, such as the portions described above. Nucleic acids encoding such fusion proteins can be prepared, e.g., as described in U.S. Pat. No. 5,434,131.

[0556] Alternatively, polypeptides encoded by the nucleic acid of the invention can be membrane bound. Membrane bound polypeptides of the invention preferably comprise a transmembrane domain. As used herein, a “transmembrane domain” refers to an amino acid sequence having at least about 20 to 25 amino acid residues in length and which contains at least about 65-70% hydrophobic amino acid residues such as alanine, leucine, isoleucine, phenylalanine, proline, tyrosine, tryptophan, or valine. The transmembrane domain can be from a Delta3 protein, such as a transmembrane domain comprising amino acid 530 to amino acid 553 of SEQ ID NO: 2, or amino acid 531 to amino acid 554 of SEQ ID NO: 25.

[0557] In a one embodiment, a nucleic acid of the invention encodes transmembrane domain contains at least about 15 to 30 amino acid residues, preferably about 20-25 amino acid residues, and has at least about 60-80%, more preferably 65-75%, and more preferably at least about 70% hydrophobic residues from about amino acid 530 to about amino acid 553 of SEQ ID NO: 2, or from about amino acid 531 to about amino acid 554 of SEQ ID NO: 25.

[0558] Alternatively, the transmembrane domain can be from another membrane protein, such as to produce a chimeric membranous Delta3 protein. Yet other polypeptides of the invention can be intracellular proteins. Accordingly, also within the scope of the invention are proteins which do not comprise a transmembrane domain. Other proteins of the invention do not include an extracellular domain. Additional proteins of the invention do not include an extracellular domain nor a transmembrane domain.

[0559] Polypeptides encoded by the nucleic acid of the invention can comprise a cytoplasmic domain. In a preferred embodiment, a nucleic acid of the invention encodes a polypeptide comprising a Delta3 cytoplasmic domain. In an even more preferred embodiment, the cytoplasmic domain has an amino acid sequence corresponding to a sequence from about amino acid 554 to about amino acid 685 of SEQ ID NO: 2, or a portion thereof, or from about amino acid 555 to about amino acid 686 of SEQ ID NO: 25.

[0560] In yet other preferred embodiments, the nucleic acid of the invention encodes a polypeptide comprising at least one domain of a Delta3 protein selected from the group consisting of: a signal peptide, a DSL motif, an EGF-like domain, a transmembrane domain, and a cytoplasmic domain. The polypeptide of the invention can comprise several of these domains from a Delta3 protein.

[0561] Alternatively, a nucleic acid of the invention encodes a polypeptide that can be a chimeric protein, i.e., comprised of at least one conserved domain of SEQ ID NO: 2, 25, 2, 25, 28, 30, 32, 34, 36, 38, 40, 42, 44 or 46, or the amino acid sequence encoded by the cDNA of a clone deposited with the ATCC® as Accession Number 98348 and at least one conserved domain from a polypeptide other than a Delta3 protein. Accordingly, in one embodiment, a nucleic acid of the invention encodes a Delta3 polypeptide of 2, 25, 28, 30, 32, 34, 36, 38, 40, 42, 44 or 46, or the amino acid sequence encoded by the cDNA of a clone deposited with the ATCC® as Accession Number 98348 wherein, for example, the DSL motif from amino acids 173-217 of SEQ ID NO: 2, are replaced with amino acids from a comparable DSL domain of a Delta-like protein other than Delta3.

[0562] In yet another embodiment, the nucleic acid encodes a Delta3 protein having a signal peptide from a protein other than a Delta3 protein. Also within the scope of the invention are Delta3 nucleic acids which encode a Delta3 polypeptide, wherein the cytoplasmic domain is other than a Delta3 cytoplasmic domain. In addition, the invention contemplates a Delta3 nucleic acid molecule, wherein the nucleic acid encodes a Delta3 polypeptide with a cytoplasmic domain and a extracellular domain from a protein other than Delta3.

[0563] Delta-like proteins other than Delta3 proteins can be, e.g., toporythmic proteins. “Toporythmic proteins” is intended to include Notch, Delta, Serrate, Enhancer of Split, Deltex, and other members of this family of proteins sharing structural similarities. (See e.g., International Patent Publication Nos. WO 97/01571 (Jan. 16, 1997); WO 92/19734 (Nov. 12, 1992) and WO 94/07474 (Apr. 14, 1994)).

[0564] Nucleic acids encoding polypeptides having an amino acid sequence that is homologous to any of the above described portions of SEQ ID NO: 2, 25, 28, 30, 32, 34, 36, 38, 40, 42, 44 or 46, or the amino acid sequence encoded by the cDNA of a clone deposited with the ATCC® as Accession Number 98348 are also within the scope of the invention. Preferred nucleic acids of the invention encode polypeptides comprising an amino acid sequence which are at least about 70%, at least about 75%, at least about 80%, or at least about 85% identical to the amino acid sequence of any of the Delta3 domains. Even more preferred nucleic acids of the invention encode polypeptides comprising an amino acid sequence which are at least about 90%, at least about 95%, at least about 98%, or at least about 99% identical to the amino acid sequence of any of the Delta3 domains.

[0565] In one embodiment, the nucleic acid, e.g., cDNA, encodes a peptide having at least one activity of the subject Delta3 polypeptide, such as the ability to bind to a Delta3 interacting molecule, such as a Delta3 receptor e.g., Notch. Non-limiting examples of binding assays for Delta3 interaction with a Delta3 interacting molecule include: measuring interaction of Delta3 polypeptides of the invention with a Delta3 interacting molecule, such as for example Notch, include binding assays involving soluble forms of Delta3 and a Delta3 interacting molecule, measuring a Delta3 domain, e.g., the DSL domain, binding to a Delta3 interacting molecule, measuring Delta3 binding to receptors expressed on cells, and measuring soluble Delta3 binding to an immobilized Delta3 interacting molecule, i.e., solid-phase binding assays. Specific examples of these assays are set forth in Shimizu et al. (1999) J. Biol. Chem. 274:32961-32969.

[0566] Additional molecules, e.g., polypeptides or peptides, capable of interacting with a Delta3 protein or fragment thereof can be identified by various methods, e.g., methods based on binding assays. For example, various types of expression libraries can be screened with a Delta3 protein or portion thereof. A two-hybrid system can be used to isolate cytoplasmic proteins interacting with the cytoplasmic domain of Delta3. Portions of Delta3 proteins which are capable of interacting with a ligand can be determined by preparing fragments of Delta3 proteins and screening these fragments for those that are capable of interacting with the ligand.

[0567] Based at least in part on the observation that the N-terminal portion of Drosophila Delta protein, which contains a DSL domain and EGF-like domain, is necessary and sufficient for in vitro binding to Notch (Henrique et al. (1995) Nature 375:787; Muskavitch (1994) Dev. Biol. 166:415), it is likely that the domain of Delta3 proteins capable of interacting with a ligand includes the DSL domain and/or at least a portion of the EGF-like domain. However, other portions of the extracellular domain of Delta3 could be necessary for binding to at least some Delta3 ligands.

[0568] In other preferred embodiments, the subject Delta3 polypeptide can modulate proliferation and/or differentiation or cell death of specific target cells, e.g., neural cells or endothelial cells. Assays for determining that a Delta3 polypeptide has at least one activity of a Delta3 protein are described infra.

[0569] Still other preferred nucleic acids of the present invention encode a Delta3 polypeptide which includes a polypeptide sequence corresponding to all or a portion of amino acid residues in SEQ ID NO: 2, 25, 28, 30, 32, 34, 36, 38, 40, 42, 44 or 46, e.g., at least 2, 5, 10, 25, 50, 100, 150 or 200 amino acid residues of that region. Preferred nucleic acids encode a polypeptide comprising at least two consecutive amino acid residues from about amino acid 1 to about amino acid 570 of the amino acid sequence set forth in SEQ ID NO: 2 or from about amino acid 1 to about amino acid 571 of the amino acid sequence set forth in SEQ ID NO: 25.

[0570] Yet other preferred nucleic acids encode a polypeptide comprising at least about 3, at least about 5, at least about 10, at least about 15, at least about 20, or at least about 25 consecutive amino acids from about amino acid 1 to about amino acid 575 set forth in SEQ ID NO: 2, from about amino acid 18 to about amino acid 575 set forth in SEQ ID NO: 2, from about amino acid 1 to about amino acid 576 set forth in SEQ ID NO: 25, or from about amino acid 18 to about amino acid 576 set forth in SEQ ID NO: 25.

[0571] The invention further provides for nucleic acids encoding a polypeptide having an amino acid sequence which is at least about 70%, preferably at least about 80%, and most preferably at least about 90% to at least about 10 consecutive amino acids set forth in SEQ ID NOs: 2, 25, 28, 30, 32, 34, 36, 38, 40, 42, 44 or 46, or at least about 10 consecutive amino acids from a portion of SEQ ID NOs: 2, 25, 28, 30, 32, 34, 36, 38, 40, 42, 44 or 46. In one embodiment, the portion corresponds to about amino acid 1 to about amino acid 575 of SEQ ID NO: 2, about amino acid 18 to about amino acid 575 of SEQ ID NO: 2, from about amino acid 1 to about amino acid 576 set forth in SEQ ID NO: 25, or from about amino acid 1 to about amino acid 576 set forth in SEQ ID NO: 25. Coding nucleic acid molecules of the invention preferably comprise at least about 200, 250, 300, 350, 400, 410, 420, 430, 435 or 440 base pairs.

[0572] The invention further pertains to nucleic acid molecules for use as probes/primer or antisense molecules (i.e. non-coding nucleic acid molecules), which can comprise at least about 6, 12, 20, 30, 50, 100, 125, 150 or 200 nucleotides or base pairs. Yet other preferred nucleic acids of the invention comprise at least about 300, at least about 350, at least about 400, at least about 450, at least about 500, or at least about 600 nucleotides of SEQ ID NOs: 1, 3, 24, 26, 27, 29, 31, 33, 35, 37, 39, 41, 43 or 45. In some embodiments, the nucleic acids of the invention correspond to a 5′ portion of nucleic acid sequence SEQ ID NO: 1, 3, 24, 26, 27, 29, 31, 33, 35, 37, 39, 41, 43 or 45. For example, a nucleic acid of the invention can correspond to a portion of about nucleotide 1 to about nucleotide 2000 of nucleic acid sequence SEQ ID NO: 1, 3, 24, 26, 27, 29, 31, 33, 35, 37, 39, 41, 43 or 45.

[0573] Preferred nucleic acids for use as a probe according to the methods of the invention include nucleic acids comprising a nucleotide sequence having at least about 6, preferably at least about 9, more preferably at least about 12 and even more preferably at least about 15 consecutive nucleotides from SEQ ID NOs: Nos:1, 3, 24, 26, 27, 29, 31, 33, 35, 37, 39, 41, 43 or 45, or from a portion thereof. In a preferred embodiment, the portion corresponds to about nucleotide 1 to about nucleotide 2060 of SEQ ID NOs: Nos:1, 3, 24, 26, 27, 29, 31, 33, 35, 37, 39, 41, 43 or 45. Alternatively a portion can be a nucleotide sequence encoding a conserved motif of hDelta3 or mDelta3 protein. Alternatively, the portion can be a nucleotide sequence located between nucleic acid sequences encoding conserved motifs of a human or mouse Delta3 protein.

[0574] The invention further provides for a combination of at least two nucleic acids corresponding to at least a portion of SEQ ID NOs: Nos:1, 3, 24, 26, 27, 29, 31, 33, 35, 37, 39, 41, 43 or 45, or a homolog thereof. Accordingly, in one embodiment, the invention provides a combination of two nucleic acids of at least about 6, preferably at least about 9, more preferably at least about 12 and even more preferably at least about 15 consecutive nucleotides from SEQ ID NOs: Nos:1, 3, 24, 26, 27, 29, 31, 33, 35, 37, 39, 41, 43 or 45, or from a portion thereof. In a preferred embodiment, at least one of the nucleic acids is labeled.

[0575] Another aspect of the invention provides a nucleic acid which hybridizes under stringent conditions to a nucleic acid represented by one of SEQ ID Nos:1, 3, 24, 26, 27, 29, 31, 33, 35, 37, 39, 41, 43 or 45. In yet another embodiment, a naturally occurring Delta3 nucleic acid of the invention, e.g., SEQ ID NO: 1, 3, 24 or 26 hybridizes under high stringency conditions to a species variant of Delta3, such as a species variant shown in any one of SEQ ID NOs: 27, 29, 31, 33, 35, 37, 39, 41, 43 or 45. In yet another embodiment, a Delta3 nucleic acid, e.g., SEQ ID NO: 1, 3, 24, 26, 27, 29, 31, 33, 35, 37, 39, 41, 43 or 45 hybridizes under high stringency conditions to a representative mammalian Delta3.

[0576] Preferred nucleic acids have a sequence at least about 75% identical and more preferably at least about 80% and even more preferably at least about 85% identical with a nucleic acid sequence of a Delta3 gene, such as a human Delta3 gene or a mouse Delta3 gene, e.g., such as a sequence shown in one of SEQ ID NOs: 1, 3, 24, 26, 27, 29, 31, 33, 35, 37, 39, 41, 43 or 45. Nucleic acids at least about 90%, more preferably at least about 95%, and most preferably at least about 98-99% homologous with a nucleic sequence represented in one of SEQ ID NOs: 1, 3, 24, 26, 27, 29, 31, 33, 35, 37, 39, 41, 43 or 45 are of course also within the scope of the invention. In preferred embodiments, the nucleic acid is a human Delta3 gene and in particularly preferred embodiments, includes all or a portion of the nucleotide sequence corresponding to the coding region of one of SEQ ID NOs: 1, 3, 24, 26, 27, 29, 31, 33, 35, 37, 39, 41, 43 or 45.

[0577] In addition to naturally-occurring allelic variants of the FTHMA-070, T85, Tango77, T129 or A259 sequence that may exist in the population, the skilled artisan will further appreciate that changes can be introduced by mutation into the nucleotide sequence of SEQ ID NO:53, SEQ ID NO:55, SEQ ID NO:57, SEQ ID NO:58, SEQ ID NO:71, SEQ ID NO:73, SEQ ID NO:76, SEQ ID NO:80, 137, 139, 145, 146, 163, 164 or the cDNA of ATCC 98807, thereby leading to changes in the amino acid sequence of the encoded FTHMA-070, T85, Tango77, T129 or A259 protein, without altering the functional ability of the FTHMA-070, T85, Tango77, T129 or A259 protein. For example, one can make nucleotide substitutions leading to amino acid substitutions at “non-essential” amino acid residues. A “non-essential” amino acid residue is a residue that can be altered from the wild-type sequence of FTHMA-070, T85, Tango77, T129 or A259 (e.g., the sequence of SEQ ID NO:54, SEQ ID NO:72, SEQ ID NO:75, SEQ ID NO:77, SEQ ID NO:79, SEQ ID NO:81, SEQ ID NO:83, SEQ ID NO:138, SEQ ID NO:147 or SEQ ID NO:165) without altering the biological activity, whereas an “essential” amino acid residue is required for biological activity. For example, amino acid residues that are conserved among the FTHMA-070, T85, Tango77, T129 or A259 proteins of various species are predicted to be particularly unamenable to alteration.

[0578] For example, preferred T85 proteins of the present invention, contain at least one fibronectin I11 or Ig superfamily domain. Such conserved domains are less likely to be amenable to mutation. Other amino acid residues, however, (e.g., those that are not conserved or only semi-conserved among T85 of various species) may not be essential for activity and thus are likely to be amenable to alteration.

[0579] Accordingly, another aspect of the invention pertains to nucleic acid molecules encoding FTHMA-070, T85, Tango77, T129 or A259 proteins that contain changes in amino acid residues that are not essential for activity. Such FTHMA-070, T85, Tango77, T129 or A259 proteins differ in amino acid sequence from SEQ ID NO:54, SEQ ID NO:58, SEQ ID NO:72, SEQ ID NO:75, SEQ ID NO:77, SEQ ID NO:79, SEQ ID NO:81, SEQ ID NO:83, SEQ ID NO:138, SEQ ID NO:147 or SEQ ID NO:165, respectively, yet retain biological activity.

[0580] For example, preferred T129 proteins of the present invention, contain at least one TNFR/NGFR cysteine rich domain. Such conserved domains are less likely to be amenable to mutation. Other amino acid residues, however, (e.g., those that are not conserved or only semi-conserved among T129 of various species) may not be essential for activity and thus are likely to be amenable to alteration.

[0581] In one embodiment, the isolated nucleic acid molecule includes a nucleotide sequence encoding a protein that includes an amino acid sequence that is at least about 45% identical, 65%, 75%, 85%, 95%, or 98% identical to the amino acid sequence of SEQ ID NO:72, SEQ ID NO:75, SEQ ID NO:77, SEQ ID NO:79, SEQ ID NO:81, SEQ ID NO:83, SEQ ID NO:138, SEQ ID NO:147 or SEQ ID NO:165.

[0582] An isolated nucleic acid molecule encoding a FTHMA-070, T85, Tango77, T129 or A259 protein having a sequence which differs from that of SEQ ID NO:54, SEQ ID NO:58, SEQ ID NO:72, SEQ ID NO:75, SEQ ID NO:77, SEQ ID NO:79, SEQ ID NO:81, SEQ ID NO:83, SEQ ID NO:83, SEQ ID NO:138, SEQ ID NO:147 or SEQ ID NO:165, respectively, can be created by introducing one or more nucleotide substitutions, additions or deletions into the nucleotide sequence of SEQ ID NO:53, SEQ ID NO:55, SEQ ID NO:57, SEQ ID NO:58, SEQ ID NO:71, SEQ ID NO:73, SEQ ID NO:76, SEQ ID NO:80, SEQ ID NO:137, SEQ ID NO:139, SEQ ID NO:145, SEQ ID NO:146, SEQ ID NO:163 or SEQ ID NO:164 or the cDNA of ATCC 98807 such that one or more amino acid substitutions, additions or deletions are introduced into the encoded protein. Mutations can be introduced by standard techniques, such as site-directed mutagenesis and PCR-mediated mutagenesis. Preferably, conservative amino acid substitutions are made at one or more predicted non-essential amino acid residues. A “conservative amino acid substitution” is one in which the amino acid residue is replaced with an amino acid residue having a similar side chain. Families of amino acid residues having similar side chains have been defined in the art. These families include amino acids with basic side chains (e.g., lysine, arginine, histidine), acidic side chains (e.g., aspartic acid, glutamic acid), uncharged polar side chains (e.g., glycine, asparagine, glutamine, serine, threonine, tyrosine, cysteine), nonpolar side chains (e.g., alanine, valine, leucine, isoleucine, proline, phenylalanine, methionine, tryptophan), beta-branched side chains (e.g., threonine, valine, isoleucine) and aromatic side chains (e.g., tyrosine, phenylalanine, tryptophan, histidine). Thus, a predicted nonessential amino acid residue in FTHMA-070, T85, Tango77, T129 or A259 is preferably replaced with another amino acid residue from the same side chain family. Alternatively, mutations can be introduced randomly along all or part of a FTHMA-070, T85, Tango77, T129 or A259 coding sequence, such as by saturation mutagenesis, and the resultant mutants can be screened for FTHMA-070, T85, Tango77, T129 or A259 biological activity to identify mutants that retain activity. Following mutagenesis, the encoded protein can be expressed recombinantly and the activity of the protein can be determined.

[0583] In a preferred embodiment, a mutant FTHMA-070 or T85 protein can be assayed for the ability to form protein:protein interactions with other proteins.

[0584] In a preferred embodiment, a mutant Tango-77 protein can be assayed for: (1) the ability to form protein:protein interactions with proteins in the Tango-77 signalling pathway; (2) the ability to bind a Tango-77 ligand or receptor; or (3) the ability to bind to an intracellular target protein or (4) the ability to interact with a protein involved in inflammation or (5) the ability to bind the IL-1 receptor. In yet another preferred embodiment, a mutant Tango-77 can be assayed for the ability to modulate inflammation, asthma, autoimmune diseases, and sepsis.

[0585] In a preferred embodiment, a mutant A259 polypeptide that is a variant of a A259 polypeptide of the invention can be assayed for: (1) the ability to form protein:protein interactions with proteins in a signaling pathway of the polypeptide of the invention; (2) the ability to bind a ligand of the polypeptide of the invention; or (3) the ability to bind to an intracellular target protein of the polypeptide of the invention. In yet another preferred embodiment, the mutant polypeptide can be assayed for the ability to modulate cellular proliferation, cellular migration or chemotaxis, or cellular differentiation.

[0586] In addition to naturally-occurring allelic variants of the SPOIL sequences that may exist in the population, the skilled artisan will further appreciate that changes can be introduced by mutation into the nucleotide sequences of SEQ ID NO:89, SEQ ID NO:101, SEQ ID NO:104, SEQ ID NO:112, the DNA insert of the plasmid deposited with ATCC as Accession Number 98883, or the DNA insert of the plasmid deposited with ATCC as Accession Number 98984, thereby leading to changes in the amino acid sequence of the encoded SPOIL proteins, without altering the functional ability of the SPOIL proteins. For example, nucleotide substitutions leading to amino acid substitutions at “non-essential” amino acid residues can be made in the sequence of SEQ ID NO:89, SEQ ID NO:101, SEQ ID NO:104, SEQ ID NO:112, the DNA insert of the plasmid deposited with ATCC as Accession Number 98883, or the DNA insert of the plasmid deposited with ATCC as Accession Number 98984. A “non-essential” amino acid residue is a residue that can be altered from the wild-type sequence of SPOIL (e.g., the sequence of SEQ ID NO:90, SEQ ID NO:102, SEQ ID NO:105, SEQ ID NO:113, the amino acid sequence encoded by the DNA insert of the plasmid deposited with ATCC as Accession Number 98883, or the amino acid sequence encoded by the DNA insert of the plasmid deposited with ATCC as Accession Number 98984) without altering the biological activity, whereas an “essential” amino acid residue is required for biological activity. For example, amino acid residues of SPOIL that are conserved among the human and murine family numbers of this invention, (as indicated by the alignment and comparison of the amino acid sequences of SEQ ID NO:90, SEQ ID NO:102, SEQ ID NO:105, SEQ ID NO:113) are predicted to be essential in SPOIL and, thus are not likely to be amenable to alteration. Table III further sets forth conserved amino residues among SPOIL proteins which are predicted to be unamenable to alteration. Furthermore, amino acid residues that are conserved among the SPOIL proteins of the present invention, and the IL-1ra protein (as indicated by the alignment presented in FIG. 7) are predicted to be unamenable to alteration.

[0587] Accordingly, another aspect of the invention pertains to nucleic acid molecules encoding SPOIL proteins that contain changes in amino acid residues that are not essential for activity. Such SPOIL proteins differ in amino acid sequence from SEQ ID NO:90, SEQ ID NO:102, SEQ ID NO:105, SEQ ID NO:113, the amino acid sequence encoded by the DNA insert of the plasmid deposited with ATCC as Accession Number 98883, or the amino acid sequence encoded by the DNA insert of the plasmid deposited with ATCC as Accession Number 98984, yet retain biological activity. In one embodiment, the isolated nucleic acid molecule comprises a nucleotide sequence encoding a protein, wherein the protein comprises an amino acid sequence at least about 60% identical to the amino acid sequence of SEQ ID NO:90, SEQ ID NO:102, SEQ ID NO:105, SEQ ID NO:113, the amino acid sequence encoded by the DNA insert of the plasmid deposited with ATCC as Accession Number 98883, or the amino acid sequence encoded by the DNA insert of the plasmid deposited with ATCC as Accession Number 98984. Preferably, the protein encoded by the nucleic acid molecule is at least about 65-70% identical to SEQ ID NO:90, SEQ ID NO:102, SEQ ID NO:105, SEQ ID NO:113, the amino acid sequence encoded by the DNA insert of the plasmid deposited with ATCC as Accession Number 98883, or the amino acid sequence encoded by the DNA insert of the plasmid deposited with ATCC as Accession Number 98984, more preferably at least about 75-80% identical to SEQ ID NO:90, SEQ ID NO:102, SEQ ID NO:105, SEQ ID NO:113, the amino acid sequence encoded by the DNA insert of the plasmid deposited with ATCC as Accession Number 98883, or the amino acid sequence encoded by the DNA insert of the plasmid deposited with ATCC as Accession Number 98984, even more preferably at least about 85-90% identical to SEQ ID NO:90, SEQ ID NO:102, SEQ ID NO:105, SEQ ID NO:113, the amino acid sequence encoded by the DNA insert of the plasmid deposited with ATCC as Accession Number 98883, or the amino acid sequence encoded by the DNA insert of the plasmid deposited with ATCC as Accession Number 98984, and most preferably at least about 95% identical to SEQ ID NO:90, SEQ ID NO:102, SEQ ID NO:105, SEQ ID NO:113, the amino acid sequence encoded by the DNA insert of the plasmid deposited with ATCC as Accession Number 98883, or the amino acid sequence encoded by the DNA insert of the plasmid deposited with ATCC as Accession Number 98984.

[0588] An isolated nucleic acid molecule encoding a SPOIL protein homologous to the protein of SEQ ID NO:90, SEQ ID NO:102, SEQ ID NO:105, SEQ ID NO:113, the amino acid sequence encoded by the DNA insert of the plasmid deposited with ATCC as Accession Number 98883, or the amino acid sequence encoded by the DNA insert of the plasmid deposited with ATCC as Accession Number 98984, can be created by introducing one or more nucleotide substitutions, additions or deletions into the nucleotide sequence of SEQ ID NO:90, SEQ ID NO:102, SEQ ID NO:105, SEQ ID NO:113, the DNA insert of the plasmid deposited with ATCC as Accession Number 98883, or the DNA insert of the plasmid deposited with ATCC as Accession Number 98984, such that one or more amino acid substitutions, additions or deletions are introduced into the encoded protein. Mutations can be introduced into SEQ ID NO:89, SEQ ID NO:101, SEQ ID NO:104, SEQ ID NO:112, the DNA insert of the plasmid deposited with ATCC as Accession Number 98883, or the DNA insert of the plasmid deposited with ATCC as Accession Number 98984, by standard techniques, such as site-directed mutagenesis and PCR-mediated mutagenesis.

[0589] Alternatively, in another embodiment, mutations can be introduced randomly along all or part of a SPOIL coding sequence, such as by saturation mutagenesis, and the resultant mutants can be screened for SPOIL biological activity to identify mutants that retain activity. Following mutagenesis of SEQ ID NO:89, SEQ ID NO:101, SEQ ID NO:104, SEQ ID NO:112, the DNA insert of the plasmid deposited with ATCC as Accession Number 98883, or the DNA insert of the plasmid deposited with ATCC as Accession Number 98984, the encoded protein can be expressed recombinantly and the activity of the protein can be determined.

[0590] In a preferred embodiment, a mutant SPOIL-I protein can be assayed for (1) the ability to modulate IL-1 signal transduction, either in vitro or in vivo; (2) modulate IL-1 stimulated cell development or differentiation, either in vitro or in vivo; and (3) modulate IL-1 stimulated cellular proliferation, either in vitro or in vivo. In yet another preferred embodiment, a mutant SPOIL can be assayed for ability to 1) modulate cellular signal transduction; 2) regulate cellular proliferation; 3) regulate cellular differentiation; 4) modulate a cell involved in immune response; and 5) modulate a cell involved in bone metabolism (e.g. osteoblast or osteoclasts).

[0591] Moreover, nucleic acid molecules encoding other NEOKINE family members (e.g., NEOKINE-2), and thus which have a nucleotide sequence which differs from the NEOKINE-1 sequences of SEQ ID NO:115, SEQ ID NO:118, SEQ ID NO:121, SEQ ID NO:124, or the nucleotide sequence of the DNA insert of the plasmid deposited with ATCC as Accession Number 98751 are intended to be within the scope of the invention. For example, a NEOKINE-2 cDNA can be identified based on the nucleotide sequence of human NEOKINE-1. Moreover, nucleic acid molecules encoding NEOKINE proteins from different species, and thus which have a nucleotide sequence which differs from the NEOKINE sequences of SEQ ID NO:115, SEQ ID NO:118, SEQ ID NO:121, SEQ ID NO:124, or the nucleotide sequence of the DNA insert of the plasmid deposited with ATCC as Accession Number 98751 are intended to be within the scope of the invention. For example, a Xenopus NEOKINE cDNA can be identified based on the nucleotide sequence of a human NEOKINE.

[0592] Nucleic acid molecules corresponding to natural allelic variants and homologues of the NEOKINE cDNAs of the invention can be isolated based on their homology to the NEOKINE nucleic acids disclosed herein using the cDNAs disclosed herein, or a portion thereof, as a hybridization probe according to standard hybridization techniques under stringent hybridization conditions.

[0593] Accordingly, in another embodiment, an isolated nucleic acid molecule of the invention is at least 15 nucleotides in length and hybridizes under stringent conditions to the nucleic acid molecule comprising the nucleotide sequence of SEQ ID NO:115, SEQ ID NO:118, SEQ ID NO:121, SEQ ID NO:124, or the nucleotide sequence of the DNA insert of the plasmid deposited with ATCC as Accession Number 98751. In other embodiment, the nucleic acid is at least 30, 50, 100, 250 or 500 nucleotides in length. As used herein, the term “hybridizes under stringent conditions” is intended to describe conditions for hybridization and washing under which nucleotide sequences at least 60% homologous to each other typically remain hybridized to each other. Preferably, the conditions are such that sequences at least about 70%, more preferably at least about 80%, even more preferably at least about 85% or 90% homologous to each other typically remain hybridized to each other. Such stringent conditions are known to those skilled in the art and can be found in Current Protocols in Molecular Biology, John Wiley & Sons, N.Y. (1989), 6.3.1-6.3.6. A preferred, non-limiting example of stringent hybridization conditions are hybridization in 6× sodium chloride/sodium citrate (SSC) at about 45° C., followed by one or more washes in 0.2×SSC, 0.1% SDS at 50° C., preferably 55° C., and more preferably 60° C. or 65° C. Preferably, an isolated nucleic acid molecule of the invention that hybridizes under stringent conditions to the sequence of SEQ ID NO:115, SEQ ID NO:118, SEQ ID NO:121, SEQ ID NO:124, corresponds to a naturally-occurring nucleic acid molecule. As used herein, a “naturally-occurring” nucleic acid molecule refers to an RNA or DNA molecule having a nucleotide sequence that occurs in nature (e.g., encodes a natural protein).

[0594] In addition to naturally-occurring allelic variants of the NEOKINE sequences that may exist in the population, the skilled artisan will further appreciate that changes can be introduced by mutation into the nucleotide sequences of SEQ ID NO:115, SEQ ID NO:118, SEQ ID NO:121, SEQ ID NO:124, or the nucleotide sequence of the DNA insert of the plasmid deposited with ATCC as Accession Number 98751, thereby leading to changes in the amino acid sequence of the encoded NEOKINE proteins, without altering the functional ability of the NEOKINE proteins. For example, nucleotide substitutions leading to amino acid substitutions at “non-essential” amino acid residues can be made in the sequence of SEQ ID NO:115, SEQ ID NO:118, SEQ ID NO:121, SEQ ID NO:124, or the nucleotide sequence of the DNA insert of the plasmid deposited with ATCC as Accession Number 98751. A “non-essential” amino acid residue is a residue that can be altered from the wild-type sequence of NEOKINE (e.g., the sequence of SEQ ID NO:116, SEQ ID NO:119, SEQ ID NO:122, or SEQ ID NO:125) without altering the biological activity, whereas an “essential” amino acid residue is required for biological activity. For example, amino acid residues that are conserved among the NEOKINE proteins of the present invention, are predicted to be particularly unamenable to alteration (e.g., the four conserved cycteines). Moreover, amino acid residues that are defined by the NEOKINE CXC motif are particularly unamenable to alteration. Furthermore, additional amino acid residues that are conserved between the NEOKINE proteins of the present invention as depicted in FIG. 8 are not likely to be amenable to alteration.

[0595] Accordingly, another aspect of the invention pertains to nucleic acid molecules encoding NEOKINE proteins that contain changes in amino acid residues that are not essential for activity. Such NEOKINE proteins differ in amino acid sequence from SEQ ID NO:116, SEQ ID NO:119, SEQ ID NO:122, or SEQ ID NO:125 yet retain biological activity. In one embodiment, the isolated nucleic acid molecule comprises a nucleotide sequence encoding a protein, wherein the protein comprises an amino acid sequence at least about 60% homologous to the amino acid sequence of SEQ ID NO:116, SEQ ID NO:119, SEQ ID NO:122, or SEQ ID NO:125. Preferably, the protein encoded by the nucleic acid molecule is at least about 65-70% homologous to SEQ ID NO:116, SEQ ID NO:119, SEQ ID NO:122, or SEQ ID NO:125, more preferably at least about 75-80% homologous to SEQ ID NO:116, SEQ ID NO:119, SEQ ID NO:122, or SEQ ID NO:125, even more preferably at least about 85-90% homologous to SEQ ID NO:116, SEQ ID NO:119, SEQ ID NO:122, or SEQ ID NO:125, and most preferably at least about 95% homologous to SEQ ID NO:116, SEQ ID NO:119, SEQ ID NO:122, or SEQ ID NO:125.

[0596] An isolated nucleic acid molecule encoding a NEOKINE protein homologous to the protein of SEQ ID NO:116, SEQ ID NO:119, SEQ ID NO:122, or SEQ ID NO:125 can be created by introducing one or more nucleotide substitutions, additions or deletions into the nucleotide sequence of SEQ ID NO:115, SEQ ID NO:118, SEQ ID NO:121, SEQ ID NO:124, or the nucleotide sequence of the DNA insert of the plasmid deposited with ATCC as Accession Number 98751, such that one or more amino acid substitutions, additions or deletions are introduced into the encoded protein. Mutations can be introduced into SEQ ID NO:115, SEQ ID NO:118, SEQ ID NO:121, SEQ ID NO:124, or the nucleotide sequence of the DNA insert of the plasmid deposited with ATCC as Accession Number 98751 by standard techniques, such as site-directed mutagenesis and PCR-mediated mutagenesis. Thus, a predicted nonessential amino acid residue in a NEOKINE protein is preferably replaced with another amino acid residue from the same side chain family. Alternatively, in another embodiment, mutations can be introduced randomly along all or part of a NEOKINE coding sequence, such as by saturation mutagenesis, and the resultant mutants can be screened for NEOKINE biological activity to identify mutants that retain activity. Following mutagenesis of SEQ ID NO:115, SEQ ID NO:118, SEQ ID NO:121, SEQ ID NO:124, or the nucleotide sequence of the DNA insert of the plasmid deposited with ATCC as Accession Number 98751, the encoded protein can be expressed recombinantly and the activity of the protein can be determined.

[0597] In a preferred embodiment, a mutant NEOKINE protein can be assayed for (1) modulation of cellular signal transduction, either in vitro or in vivo; (2) regulation of gene transcription in a cell expressing a NEOKINE receptor (e.g., RDC1) or receptor which is specific for another chemokine; (3) regulation of gene transcription in a cell expressing a NEOKINE receptor or receptor which is specific for another chemokine, wherein said cell is involved in angiogenesis or inflammation; (4) regulation of angiogenesis; (5) regulation of angiogenesis, wherein said regulation comprises inhibibition of angiogenesis; (6) regulation of angiogenesis, wherein said regulation comprises maintenance of angiostasis; (7) regulation of inflammation; and (8) regulation of inflammation, wherein said regulation comprises inhibition of chemoattraction (e.g., neutrophil chemoattraction).

[0598] The present invention encompasses antisense nucleic acid molecules, i.e., molecules which are complementary to a sense nucleic acid encoding a polypeptide of the invention, e.g., complementary to the coding strand of a double-stranded cDNA molecule or complementary to an mRNA sequence. Accordingly, an antisense nucleic acid can hydrogen bond to a sense nucleic acid. The antisense nucleic acid can be complementary to an entire Delta3, FTHMA-070, Tango85, Tango77, SPOIL, NEOKINE, Tango129 or A259 coding strand, or to only a portion thereof, e.g., all or part of the protein coding region (or open reading frame). An antisense nucleic acid molecule can be antisense to all or part of a Delta3, FTHMA-070, Tango85, Tango77, SPOIL, NEOKINE, Tango129 or A259 non-coding region of the coding strand of a nucleotide sequence encoding a Delta3, FTHMA-070, Tango85, Tango77, SPOIL, NEOKINE, Tango129 or A259 polypeptide of the invention. The non-coding regions (“5′ and 3′ untranslated regions”) are the 5′ and 3′ sequences which flank the coding region and are not translated into amino acids.

[0599] Given the coding strand sequences encoding FTHMA-070 or T85 disclosed herein, antisense nucleic acids of the invention can be designed according to the rules of Watson and Crick base pairing. The antisense nucleic acid molecule can be complementary to the entire coding region of FTHMA-070 or T85 mRNA, but more preferably is an oligonucleotide which is antisense to only a portion of the coding or noncoding region of FTHMA-070 or T85 mRNA.

[0600] Given the coding strand sequences encoding Tango-77 disclosed herein (e.g., SEQ ID NO:73, SEQ ID NO:75, or SEQ ID NO:78), antisense nucleic acids of the invention can be designed according to the rules of Watson and Crick base pairing. The antisense nucleic acid molecule can be complementary to the entire coding region of Tango-77 mRNA, but more preferably is an oligonucleotide which is antisense to only a portion of the coding or noncoding region of Tango-77 mRNA. For example, the antisense oligonucleotide can be complementary to the region surrounding the translation start site of Tango-77 mRNA, e.g., an oligonucleotide having the sequence

| 5′-TGCAACTTTTACAGGAAACAC-3′ | (SEQ ID NO: 193) |
|---|---|
| or | |
| 5′-CCTCACTTTTACCCGAGACTC-3′ | (SEQ ID NO: 194) |
| or | |
| 5′-GACGGGTGGTACTTAAAACAA-3′. | (SEQ ID NO: 195) |

[0601] Given the coding strand sequences encoding SPOIL disclosed herein (e.g., SEQ ID NO:89, SEQ ID NO:101, SEQ ID NO:104, SEQ ID NO:112, the DNA insert of the plasmid deposited with ATCC as Accession Number 98883, or the DNA insert of the plasmid deposited with ATCC as Accession Number 98984), antisense nucleic acids of the invention can be designed according to the rules of Watson and Crick base pairing. The antisense nucleic acid molecule can be complementary to the entire coding region of SPOIL mRNA, but more preferably is an oligonucleotide which is antisense to only a portion of the coding region of SPOIL mRNA. For example, the antisense oligonucleotide can be complementary to the region surrounding the translation start site of SPOIL mRNA.

[0602] Given the coding strand sequences encoding NEOKINE disclosed herein (e.g., SEQ ID NO:117, SEQ ID NO:120, or SEQ ID NO:123), antisense nucleic acids of the invention can be designed according to the rules of Watson and Crick base pairing. The antisense nucleic acid molecule can be complementary to the entire coding region of NEOKINE mRNA, but more preferably is an oligonucleotide which is antisense to only a portion of the coding or noncoding region of NEOKINE mRNA. For example, the antisense oligonucleotide can be complementary to the region surrounding the translation start site of NEOKINE mRNA.

[0603] Given the coding strand sequences encoding T129 disclosed herein (e.g., SEQ ID NO:137 or SEQ ID NO:139), antisense nucleic acids of the invention can be designed according to the rules of Watson and Crick base pairing. The antisense nucleic acid molecule can be complementary to the entire coding region of T129 mRNA, but more preferably is an oligonucleotide which is antisense to only a portion of the coding or noncoding region of T129 mRNA. For example, the antisense oligonucleotide can be complementary to the region surrounding the translation start site of T129 mRNA, e.g., an oligonucleotide having the sequence

| | |
|---|---|
| CTGGTGGTCCCCGGACTCCTACTTCGGTT | (SEQ ID NO: 143) |
| or | |
| GACTCCTACTTCGGTTCAGA. | (SEQ ID NO: 144) |

[0604] An antisense oligonucleotide can be, for example, about 5, 10, 15, 20, 25, 30, 35, 40, 45 or 50 nucleotides in length. An antisense nucleic acid of the invention can be constructed using chemical synthesis and enzymatic ligation reactions using procedures known in the art. For example, an antisense nucleic acid (e.g., an antisense oligonucleotide) can be chemically synthesized using naturally-occurring nucleotides or variously modified nucleotides designed to increase the biological stability of the molecules or to increase the physical stability of the duplex formed between the antisense and sense nucleic acids, e.g., phosphorothioate derivatives and acridine substituted nucleotides can be used. Examples of modified nucleotides which can be used to generate the antisense nucleic acid include 5-fluorouracil, 5-bromouracil, 5-chlorouracil, 5-iodouracil, hypoxanthine, xanthine, 4-acetylcytosine, 5-(carboxyhydroxylmethyl) uracil, 5-carboxymethylaminomethyl-2-thiouridine, 5-carboxymethylaminomethyluracil, dihydrouracil, beta-D-galactosylqueosine, inosine, N6-isopentenyladenine, 1-methylguanine, 1-methylinosine, 2,2-dimethylguanine, 2-methyladenine, 2-methylguanine, 3-methylcytosine, 5-methylcytosine, N6-adenine, 7-methylguanine, 5-methylaminomethyluracil, 5-methoxyaminomethyl-2-thiouracil, beta-D-mannosylqueosine, 5′-methoxycarboxymethyluracil, 5-methoxyuracil, 2-methylthio-N-6-isopentenyladenine, uracil-5-oxyacetic acid (v), wybutoxosine, pseudouracil, queosine, 2-thiocytosine, 5-methyl-2-thiouracil, 2-thiouracil, 4-thiouracil, 5-methyluracil, uracil-5-oxyacetic acid methylester, uracil-5-oxyacetic acid (v), 5-methyl-2-thiouracil, 3-(3-amino-3-N2-carboxypropyl) uracil, (acp3)w, and 2,6-diaminopurine. Alternatively, the antisense nucleic acid can be produced biologically using an expression vector into which a nucleic acid has been subcloned in an antisense orientation (i.e., RNA transcribed from the inserted nucleic acid will be of an antisense orientation to a target nucleic acid of interest, described further in the following subsection).

[0605] The antisense nucleic acid molecules of the invention are typically administered, individually or in combination (that is two, three, four, or more different antisense molecules), to a subject or generated in situ such that they hybridize with or bind to cellular mRNA and/or genomic DNA encoding a selected polypeptide of the invention to thereby inhibit expression, e.g., by inhibiting transcription and/or translation. The hybridization can be by conventional nucleotide complementarity to form a stable duplex, or, for example, in the case of an antisense nucleic acid molecule which binds to DNA duplexes, through specific interactions in the major groove of the double helix. An example of a route of administration of antisense nucleic acid molecules of the invention includes direct injection at a tissue site. Alternatively, antisense nucleic acid molecules can be modified to target selected cells and then administered systemically. For example, for systemic administration, antisense molecules can be modified such that they specifically bind to receptors or antigens expressed on a selected cell surface, e.g., by linking the antisense nucleic acid molecules to peptides or antibodies which bind to cell surface receptors or antigens. The antisense nucleic acid molecules can also be delivered to cells using the vectors described herein. To achieve sufficient intracellular concentrations of the antisense molecules, vector constructs in which the antisense nucleic acid molecule is placed under the control of a strong pol II or pol III promoter are preferred.

[0606] An antisense nucleic acid molecule of the invention can be an α-anomeric nucleic acid molecule. An α-anomeric nucleic acid molecule forms specific double-stranded hybrids with complementary RNA in which, contrary to the usual β-units, the strands run parallel to each other (Gaultier et al. (1987) Nucleic Acids Res. 15:6625-6641). The antisense nucleic acid molecule can also comprise a 2′-o-methylribonucleotide (Inoue et al. (1987) Nucleic Acids Res. 15:6131-6148) or a chimeric RNA-DNA analogue (Inoue et al. (1987) FEBS Lett. 215:327-330).

[0607] The invention also encompasses ribozymes. Ribozymes are catalytic RNA molecules with ribonuclease activity which are capable of cleaving a single-stranded nucleic acid, such as an mRNA, to which they have a complementary region. Thus, ribozymes (e.g., hammerhead ribozymes (described in Haselhoff and Gerlach (1988) Nature 334:585-591)) can be used to catalytically cleave mRNA transcripts to thereby inhibit translation of the protein encoded by the mRNA. A ribozyme having specificity for a nucleic acid molecule encoding a polypeptide of the invention can be designed based upon the nucleotide sequence of a cDNA disclosed herein. For example, a derivative of a Tetrahymena L-19 IVS RNA can be constructed in which the nucleotide sequence of the active site is complementary to the nucleotide sequence to be cleaved in a Cech et al. U.S. Pat. No. 4,987,071; and Cech et al. U.S. Pat. No. 5,116,742. Alternatively, an mRNA encoding a polypeptide of the invention can be used to select a catalytic RNA having a specific ribonuclease activity from a pool of RNA molecules. See, e.g., Bartel and Szostak (1993) Science 261:1411-1418.

[0608] The invention also encompasses nucleic acid molecules which form triple helical structures. For example, expression of a polypeptide of the invention can be inhibited by targeting nucleotide sequences complementary to the regulatory region of the gene encoding the polypeptide (e.g., the promoter and/or enhancer) to form triple helical structures that prevent transcription of the gene in target cells. See generally Helene (1991) Anticancer Drug Des. 6(6):569-84; Helene (1992) Ann. N.Y. Acad. Sci. 660:27-36; and Maher (1992) Bioassays 14(12):807-15.

[0609] In various embodiments, the nucleic acid molecules of the invention can be modified at the base moiety, sugar moiety or phosphate backbone to improve, e.g., the stability, hybridization, or solubility of the molecule. For example, the deoxyribose phosphate backbone of the nucleic acids can be modified to generate peptide nucleic acids (see Hyrup et al. (1996) Bioorganic & Medicinal Chemistry 4(1): 5-23). As used herein, the terms “peptide nucleic acids” or “PNAs” refer to nucleic acid mimics, e.g., DNA mimics, in which the deoxyribose phosphate backbone is replaced by a pseudopeptide backbone and only the four natural nucleobases are retained. The neutral backbone of PNAs has been shown to allow for specific hybridization to DNA and RNA under conditions of low ionic strength. The synthesis of PNA oligomers can be performed using standard solid phase peptide synthesis protocols as described in Hyrup et al. (1996) Bioorganic & Medicinal Chemistry 4(1): 5-23; Perry-O'Keefe et al. (1996) Proc. Natl. Acad. Sci. USA 93: 14670-675.

[0610] PNAs of Delta3, FTHMA-070, Tango85, Tango77, SPOIL, NEOKINE, Tango129 and A259 can be used in therapeutic and diagnostic applications. For example, PNAs can be used as antisense or antigene agents for sequence-specific modulation of gene expression by, e.g., inducing transcription or translation arrest or inhibiting replication. PNAs can also be used, e.g., in the analysis of single base pair mutations in a gene by, e.g., PNA directed PCR clamping; as artificial restriction enzymes when used in combination with other enzymes, e.g., S1 nucleases (Hyrup et al. (1996) Bioorganic & Medicinal Chemistry 4(1): 5-23; or as probes or primers for DNA sequence and hybridization (Hyrup et al. (1996) Bioorganic & Medicinal Chemistry 4(1): 5-23; Perry-O'Keefe et al. (1996) Proc. Natl. Acad. Sci. USA 93: 14670-675).

[0611] In another embodiment, PNAs of Delta3, FTHMA-070, Tango85, Tango77, SPOIL, NEOKINE, Tango129 and A259 can be modified, e.g., to enhance their stability or cellular uptake, by attaching lipophilic or other helper groups to PNA, by the formation of PNA-DNA chimeras, or by the use of liposomes or other techniques of drug delivery known in the art. For example, PNA-DNA chimeras can be generated which may combine the advantageous properties of PNA and DNA. Such chimeras allow DNA recognition enzymes, e.g., RNAse H and DNA polymerases, to interact with the DNA portion while the PNA portion would provide high binding affinity and specificity. PNA-DNA chimeras can be linked using linkers of appropriate lengths selected in terms of base stacking, number of bonds between the nucleobases, and orientation (Hyrup et al. (1996) Bioorganic & Medicinal Chemistry 4(1): 5-23). The synthesis of PNA-DNA chimeras can be performed as described in Hyrup et al. (1996) Bioorganic & Medicinal Chemistry 4(1): 5-23, and Finn et al. (1996) Nucleic Acids Res. 24(17):3357-63. For example, a DNA chain can be synthesized on a solid support using standard phosphoramidite coupling chemistry and modified nucleoside analogs. Compounds such as 5′-(4-methoxytrityl)amino-5′-deoxy-thymidine phosphoramidite can be used as a link between the PNA and the 5′ end of DNA (Mag et al. (1989) Nucleic Acids Res. 17:5973-88). PNA monomers are then coupled in a stepwise manner to produce a chimeric molecule with a 5′ PNA segment and a 3′ DNA segment (Finn et al. (1996) Nucleic Acids Res. 24(17):3357-63). Alternatively, chimeric molecules can be synthesized with a 5′ DNA segment and a 3′ PNA segment (Peterser et al. (1975) Bioorganic Med. Chem. Lett. 5:1119-11124).

[0612] In other embodiments, the oligonucleotide may include other appended groups such as peptides (e.g., for targeting host cell receptors in vivo), or agents facilitating transport across the cell membrane (see, e.g., Letsinger et al. (1989) Proc. Natl. Acad. Sci. USA 86:6553-6556; Lemaitre et al. (1987) Proc. Natl. Acad. Sci. USA 84:648-652; PCT Publication NO: WO 88/09810) or the blood-brain barrier (see, e.g., PCT Publication NO: WO 89/10134). In addition, oligonucleotides can be modified with hybridization-triggered cleavage agents (see, e.g., Krol et al. (1988) Bio/Techniques 6:958-976) or intercalating agents (see, e.g., Zon (1988) Pharm. Res. 5:539-549). To this end, the oligonucleotide may be conjugated to another molecule, e.g., a peptide, hybridization triggered cross-linking agent, transport agent, hybridization-triggered cleavage agent, etc.

[0613] Nucleic acids having a sequence that differs from the nucleotide sequences shown in one of SEQ ID Nos: 1, 3, 24, 26, 27, 29, 31, 33, 35, 37, 39, 41, 43 or 45 due to degeneracy in the genetic code are also within the scope of the invention. Such nucleic acids encode functionally equivalent peptides (i.e., a peptide having a biological activity of a Delta3 polypeptide) but differ from the sequence shown in the sequence listing due to degeneracy in the genetic code. For example, a number of amino acids are designated by more than one triplet. Codons that specify the same amino acid, or synonyms (for example, CAU and CAC each encode histidine) may result in “silent” mutations which do not affect the amino acid sequence of a Delta3 polypeptide. However, it is expected that DNA sequence polymorphisms that do lead to changes in the amino acid sequences of the subject Delta3 polypeptides will exist. One skilled in the art will appreciate that these variations in one or more nucleotides (e.g., up to about 3-5% of the nucleotides) of the nucleic acids encoding polypeptides having an activity of a Delta3 polypeptide may exist among individuals of a given species due to natural allelic variation.

[0614] As indicated by the examples set out below, Delta3 protein-encoding nucleic acids can be obtained from mRNA present in any of a number of eukaryotic cells. It should also be possible to obtain nucleic acids encoding Delta3 polypeptides of the present invention from genomic DNA from both adults and embryos. For example, a gene encoding a Delta3 protein can be cloned from either a cDNA or a genomic library in accordance with protocols described herein, as well as those generally known to persons skilled in the art. Examples of tissues and/or libraries suitable for isolation of the subject nucleic acids include endothelial cell libraries, among others. A cDNA encoding a Delta3 protein can be obtained by isolating total mRNA from a cell, e.g., a vertebrate cell, a mammalian cell, or a human cell, including embryonic cells. Double stranded cDNAs can then be prepared from the total mRNA, and subsequently inserted into a suitable plasmid or bacteriophage vector using any one of a number of known techniques. The gene encoding a Delta3 protein can also be cloned using established polymerase chain reaction techniques in accordance with the nucleotide sequence information provided by the invention. The nucleic acid of the invention can be DNA or RNA. A preferred nucleic acid is a cDNA represented by a sequence selected from the group consisting of SEQ ID NOs: 1, 3, 24, 26, 27, 29, 31, 33, 35, 37, 39, 41, 43 or 45.

### Delta3 Vectors

[0615] This invention also provides expression vectors containing a nucleic acid encoding a Delta3 polypeptide, operably linked to at least one transcriptional regulatory sequence. “Operably linked” is intended to mean that the nucleotide sequence is linked to a regulatory sequence in a manner which allows expression of the nucleotide sequence. Regulatory sequences are art-recognized and are selected to direct expression of the subject Delta3 proteins. Accordingly, the term “transcriptional regulatory sequence” includes promoters, enhancers and other expression control elements. Such regulatory sequences are described in Goeddel; Gene Expression Technology: Methods in Enzymology 185, Academic Press, San Diego, Calif. (1990). In one embodiment, the expression vector includes a recombinant gene encoding a peptide having an agonistic activity of a subject Delta3 polypeptide, or alternatively, encoding a peptide which is an antagonistic form of the Delta3 protein. Such expression vectors can be used to transfect cells and thereby produce polypeptides, including fusion proteins, encoded by nucleic acids as described herein. Moreover, the gene constructs of the present invention can also be used as a part of a gene therapy protocol to deliver nucleic acids encoding either an agonistic or antagonistic form of one of the subject Delta3 proteins. Thus, another aspect of the invention features expression vectors for in vivo or in vitro transfection and expression of a Delta3 polypeptide in particular cell types so as to reconstitute the function of, or alternatively, abrogate the function of Delta-induced signaling in a tissue. This could be desirable, for example, when the naturally-occurring form of the protein is expressed inappropriately; or to deliver a form of the protein which alters differentiation of tissue. Expression vectors may also be employed to inhibit neoplastic transformation.

[0616] In addition to viral transfer methods, such as those illustrated above, non-viral methods can also be employed to cause expression of a subject Delta3 polypeptide in the tissue of an animal. Most nonviral methods of gene transfer rely on normal mechanisms used by mammalian cells for the uptake and intracellular transport of macromolecules. In preferred embodiments, non-viral targeting means of the present invention rely on endocytic pathways for the uptake of the subject Delta3 polypeptide gene by the targeted cell. Exemplary targeting means of this type include liposomal derived systems, polylysine conjugates, and artificial viral envelopes.

### Delta3 Probes and Primers

[0617] Moreover, the nucleotide sequences determined from the cloning of hDelta3 genes will further allow for the generation of probes and primers designed for use in identifying and/or cloning Delta3 homologs in other cell types, e.g., from other tissues, as well as Delta3 homologs from other mammalian organisms. Probes and primers of the invention can also be used to determine the identity of a Delta3 allele and/or the presence or absence of one or more mutations in a Delta3 gene of a subject. In a preferred embodiment, a probe or primer of the invention can be used to determine whether a subject has or is at risk of developing a disease or condition associated with a specific Delta3 allele, such as an allele carrying a mutation.

[0618] In a preferred embodiment, the present invention also provides a probe/primer comprising a substantially purified oligonucleotide, which oligonucleotide comprises a region of nucleotide sequence that hybridizes under stringent conditions to at least about 12, preferably about 25, more preferably about 40, 50 or 75 consecutive nucleotides of sense or anti-sense sequence selected from the group consisting of SEQ ID NO:1, 3, 24, 26, 27, 29, 31, 33, 35, 37, 39, 41, 43 or 45, or naturally-occurring mutants thereof. For instance, primers based on the nucleic acid represented in SEQ ID NOs:1, 3, 24, 26, 27, 29, 31, 33, 35, 37, 39, 41, 43 or 45 can be used in PCR reactions to clone Delta3 homologs, e.g., specific Delta3 alleles. Such primers are preferably selected in a region which does not share significant homology to other genes, e.g., other Delta genes. Examples of primers of the invention are set forth as SEQ ID NOs:12-15, set forth below:

5′ end primers:
(SEQ ID NO: 12; corresponding to
nucleotides 356 to 375 of SEQ ID NO: 1)
5′ AGCGCCTCTGGCTGGGCGCT 3′;
(SEQ ID NO: 13; corresponding to
nucleotides 725 to 744 of SEQ ID NO: 1)
5′ CGGCCAGAGGCCTTGCCACC 3′;
3′ end primers:
(SEQ ID NO: 14; corresponding to
the complement of nucleotides
1460 to 1479 of SEQ ID NO: 1)
5′ TTGCGCTCCCGGCTGGAGCC 3′;
and
(SEQ ID NO: 15; corresponding to
the complement of nucleotides
1592 to 2611 of SEQ ID NO: 1)
5′ ATGCGGCTTGGACCTCGGTT 3′.

[0619] Likewise, probes based on the subject Delta3 sequences can be used to detect transcripts or genomic sequences encoding the same or homologous proteins. In preferred embodiments, the probe further comprises a label group attached thereto and able to be detected, e.g., the label group is selected from amongst radioisotopes, fluorescent compounds, enzymes, and enzyme co-factors.

[0620] As discussed in more detail below, such probes can also be used as a part of a diagnostic test kit for identifying cells or tissue which misexpress a Delta3 protein, such as by measuring a level of a Delta-encoding nucleic acid in a sample of cells from a patient; e.g., detecting Delta3 mRNA levels or determining whether a genomic Delta3 gene has been mutated or deleted. Briefly, nucleotide probes can be generated from the subject Delta3 genes which facilitate histological screening of intact tissue and tissue samples for the presence (or absence) of Delta-encoding transcripts. Similar to the diagnostic uses of anti-Delta3 antibodies, the use of probes directed to Delta3 messages, or to genomic Delta3 sequences, can be used for both predictive and therapeutic evaluation of allelic mutations which might be manifest in, for example, neoplastic or hyperplastic disorders (e.g., unwanted cell growth) or abnormal differentiation of tissue. Used in conjunction with immunoassays as described herein, the oligonucleotide probes can help facilitate the determination of the molecular basis for a developmental disorder which may involve some abnormality associated with expression (or lack thereof) of a Delta3 protein. For instance, variation in polypeptide synthesis can be differentiated from a mutation in a coding sequence.

[0621] Also within the scope of the invention are kits for determining whether a subject is at risk of developing a disease or condition caused by or contributed by an aberrant Delta3 activity and/or which is associated with one or more specific Delta3 alleles. In a preferred embodiment, the kit can be used for determining whether a subject is at risk of developing a neurological disease or disorder, e.g., a peripheral neuropathy, e.g., ACCPN.

### Delta3 Antisense, Ribozyme and Triplex Techniques

[0622] One aspect of the invention relates to the use of the isolated nucleic acid in “antisense” therapy. As used herein, “antisense” therapy refers to administration or in situ generation of oligonucleotide molecules or their derivatives which specifically hybridize (e.g., bind) under cellular conditions, with the cellular mRNA and/or genomic DNA encoding one or more of the subject Delta3 proteins so as to inhibit expression of that protein, e.g., by inhibiting transcription and/or translation. The binding may be by conventional base pair complementarity, or, for example, in the case of binding to DNA duplexes, through specific interactions in the major groove of the double helix. In general, “antisense” therapy refers to the range of techniques generally employed in the art, and includes any therapy which relies on specific binding to oligonucleotide sequences.

[0623] An antisense construct of the present invention can be delivered, for example, as an expression plasmid which, when transcribed in the cell, produces RNA which is complementary to at least a unique portion of the cellular mRNA which encodes a Delta3 protein. Alternatively, the antisense construct is an oligonucleotide probe which is generated ex vivo and which, when introduced into the cell causes inhibition of expression by hybridizing with the mRNA and/or genomic sequences of a Delta3 gene. Such oligonucleotide probes are preferably modified oligonucleotides which are resistant to endogenous nucleases, e.g., exonucleases and/or endonucleases, and are therefore stable in vivo. Exemplary nucleic acid molecules for use as antisense oligonucleotides are phosphoramidate, phosphothioate and methylphosphonate analogs of DNA (see also U.S. Pat. Nos. 5,176,996; 5,264,564; and 5,256,775). Additionally, general approaches to constructing oligomers useful in antisense therapy have been reviewed, for example, by Van der Krol et al. (1988) Biotechniques 6:958-976; and Stein et al. (1988) Cancer Res 48:2659-2668.

[0624] With respect to antisense DNA, oligodeoxyribonucleotides derived from the translation initiation site, i.e., the ATG codon which encodes the first methionine of the cDNA, e.g., between the −10 and +10 regions of the Delta3 nucleotide sequence of interest, are preferred. Preferred antisense molecules of the invention are from nucleotides 328 to 348 of SEQ ID NO:1 or nucleotides 38 to 58 of SEQ ID NO:24. Non-limiting examples of preferred human and mouse antisense primers are shown below:

(SEQ ID NO: 16)
5′ TGCCGCCATCCCTCGGGGCGT 3′
(complement to nucleotides 326-346 of SEQ ID NO: 1)
(SEQ ID NO: 17)
5′ GGACGCTGCCGCCATCCCCT 3′
(complement to nucleotides 333-352 of SEQ ID NO: 1)
(SEQ ID NO: 18)
5′ GGACGCTGCCGCCATCCCCTCGGGGCGT 3′
(complement to nucleotides 326-352 of SEQ ID NO: 1)
(SEQ ID NO: 47)
5′ CTCCGGGACGCAGGCGTCATCCCT 3′
(complement to nucleotides 38-58 of SEQ ID NO: 24)
(SEQ ID NO: 48)
5′ ACAGGCGCTCCGGGACGCAGGCGTCATCC 3′
(complement to nucleotides 40-65 of SEQ ID NO: 24)

[0625] Antisense approaches involve the design of oligonucleotides (either DNA or RNA) that are complementary to Delta3 mRNA. The antisense oligonucleotides will bind to the Delta3 mRNA transcripts and prevent translation. Absolute complementarity, although preferred, is not required. A sequence “complementary” to a portion of an RNA, as referred to herein, means a sequence having sufficient complementarity to be able to hybridize with the RNA, forming a stable duplex; in the case of double-stranded antisense nucleic acids, a single strand of the duplex DNA may thus be tested, or triplex formation may be assayed. The ability to hybridize will depend on both the degree of complementarity and the length of the antisense nucleic acid. Generally, the longer the hybridizing nucleic acid, the more base mismatches with an RNA it may contain and still form a stable duplex (or triplex, as the case may be). One skilled in the art can ascertain a tolerable degree of mismatch by use of standard procedures to determine the melting point of the hybridized complex.

[0626] Oligonucleotides that are complementary to the 5′ end of the message, e.g., the 5′ untranslated sequence up to and including the AUG initiation codon, should work most efficiently at inhibiting translation. However, sequences complementary to the 3′ untranslated sequences of mRNAs have recently been shown to be effective at inhibiting translation of mRNAs as well. (Wagner, R. (1994) Nature 372:333). Therefore, oligonucleotides complementary to either the 5′ or 3′ untranslated, non-coding regions of a Delta3 gene could be used in an antisense approach to inhibit translation of endogenous Delta3 mRNA. Oligonucleotides complementary to the 5′ untranslated region of the mRNA should include the complement of the AUG start codon. Antisense oligonucleotides complementary to mRNA coding regions are less efficient inhibitors of translation but could be used in accordance with the invention. Whether designed to hybridize to the 5′, 3′ or coding region of Delta3 mRNA, antisense nucleic acids should be at least six nucleotides in length, and are preferably oligonucleotides ranging from 6 to about 50 nucleotides in length. In certain embodiments, the oligonucleotide is at least 10 nucleotides, at least 17 nucleotides, at least 25 nucleotides, or at least 50 nucleotides.

[0627] Regardless of the choice of target sequence, it is preferred that in vitro studies are first performed to quantitate the ability of the antisense oligonucleotide to quantitate the ability of the antisense oligonucleotide to inhibit gene expression. It is preferred that these studies utilize controls that distinguish between antisense gene inhibition and nonspecific biological effects of oligonucleotides. It is also preferred that these studies compare levels of the target RNA or protein with that of an internal control RNA or protein. Additionally, it is envisioned that results obtained using the antisense oligonucleotide are compared with those obtained using a control oligonucleotide. It is preferred that the control oligonucleotide is of approximately the same length as the test oligonucleotide and that the nucleotide sequence of the oligonucleotide differs from the antisense sequence no more than is necessary to prevent specific hybridization to the target sequence.

[0628] The oligonucleotides can be DNA or RNA or chimeric mixtures or derivatives or modified versions thereof, single-stranded or double-stranded. The oligonucleotide can be modified at the base moiety, sugar moiety, or phosphate backbone, for example, to improve stability of the molecule, hybridization, etc. The oligonucleotide may include other appended groups such as peptides (e.g., for targeting host cell receptors in vivo), or agents facilitating transport across the cell membrane (see, e.g., Letsinger et al. (1989) Proc. Natl. Acad. Sci. U.S.A. 86:6553-6556; Lemaitre et al. (1987) Proc. Natl. Acad. Sci. USA 84:648-652; PCT Publication NO: WO 88/09810, Dec. 15, 1988) or the blood-brain barrier (see, e.g., PCT Publication NO: WO 89/10134, Apr. 25, 1988), hybridization-triggered cleavage agents. (See, e.g., Krol et al. (1988) BioTechniques 6:958-976) or intercalating agents. (See, e.g., Zon (1988) Pharm. Res. 5:539-549). To this end, the oligonucleotide may be conjugated to another molecule, e.g., a peptide, hybridization triggered cross-linking agent, transport agent, hybridization-triggered cleavage agent, etc.

[0629] The anti sense oligonucleotide may comprise at least one modified base moiety which is selected from the group including but not limited to 5-fluorouracil, 5-bromouracil, 5-chlorouracil, 5-iodouracil, hypoxanthine, xantine, 4-acetylcytosine, 5-(carboxyhydroxylmethyl) uracil, 5-carboxymethylaminomethyl-2-thiouridine, 5-carboxymethylaminomethyluracil, dihydrouracil, beta-D-galactosylqueosine, inosine, N6-isopentenyladenine, 1-methylguanine, 1-methylinosine, 2,2-dimethylguanine, 2-methyladenine, 2-methylguanine, 3-methylcytosine, 5-methylcytosine, N6-adenine, 7-methylguanine, 5-methylaminomethyluracil, 5-methoxyaminomethyl-2-thiouracil, beta-D-mannosylqueosine, 5′-methoxycarboxymethyluracil, 5-methoxyuracil, 2-methylthio-N-6-isopentenyladenine, uracil-5-oxyacetic acid (v), wybutoxosine, pseudouracil, queosine, 2-thiocytosine, 5-methyl-2-thiouracil, 2-thiouracil, 4-thiouracil, 5-methyluracil, uracil-5-oxyacetic acid methylester, uracil-5-oxyacetic acid (v), 5-methyl-2-thiouracil, 3-(3-amino-3-N2-carboxypropyl) uracil, (acp3)w, and 2,6-diaminopurine.

[0630] The antisense oligonucleotide may also comprise at least one modified sugar moiety selected from the group including but not limited to arabinose, 2-fluoroarabinose, xylulose, and hexose.

[0631] In yet another embodiment, the antisense oligonucleotide comprises at least one modified phosphate backbone selected from the group consisting of a phosphorothioate, a phosphorodithioate, a phosphoramidothioate, a phosphoramidate, a phosphordiamidate, a methylphosphonate, an alkyl phosphotriester, and a formacetal or analog thereof.

[0632] In yet another embodiment, the antisense oligonucleotide is an α-anomeric oligonucleotide. An α-anomeric oligonucleotide forms specific double-stranded hybrids with complementary RNA in which, contrary to the usual β-units, the strands run parallel to each other (Gautier et al. (1987) Nucl. Acids Res. 15:6625-6641). The oligonucleotide is a 2′-O-methylribonucleotide (Inoue et al. (1987) Nucl. Acids Res. 15:6131-6148), or a chimeric RNA-DNA analogue (Inoue et al. (1987) FEBS Lett. 215:327-330).

[0633] Oligonucleotides of the invention may be synthesized by standard methods known in the art, e.g. by use of an automated DNA synthesizer (such as are commercially available from Biosearch, Applied Biosystems, etc.). As examples, phosphorothioate oligonucleotides may be synthesized by the method of Stein et al. (1988, Nucl. Acids Res. 16:3209), methylphosphonate oligonucleotides can be prepared by use of controlled pore glass polymer supports (Sarin et al. (1988) Proc. Natl. Acad. Sci. U.S.A. 85:7448-7451), etc.

[0634] While antisense nucleic acids complementary to the coding region sequence could be used, those complementary to the transcribed untranslated region are preferred. Antisense nucleic acids overlapping the site of initiation of translation are even more preferred. For example, antisense oligonucleotides as set forth below can be utilized in accordance with the invention.

| | |
|---|---|
| 5′ TCAATCTGGCTCTGTTCGCG 3′ | (SEQ ID NO: 19) |

(complement to nucleotides 284-303 of SEQ ID NO: 1)

| | |
|---|---|
| 5′ CGCTCTCTCCACCCGCGGGCCCTCAA 3′ | (SEQ ID NO: 20) |

(complement to nucleotides 300-325 of SEQ ID NO: 1)

| | |
|---|---|
| 5′ GGTGTCCTCTCCACCGGACGCGTGGG 3′ | (SEQ ID NO: 49) |

(complement to nucleotides 6-31 of SEQ ID NO: 24)

| | |
|---|---|
| 5′ GTCCTCTCCACCGGACGCGTGG 3′ | (SEQ ID NO: 50) |

(complement to nucleotides 6-28 of SEQ ID NO: 24)

[0635] The antisense molecules should be delivered to cells which express the Delta3 in vivo. A number of methods have been developed for delivering antisense DNA or RNA to cells; e.g., antisense molecules can be injected directly into the tissue site, or modified antisense molecules, designed to target the desired cells (e.g., antisense linked to peptides or antibodies that specifically bind receptors or antigens expressed on the target cell surface) can be administered systematically.

[0636] However, it is often difficult to achieve intracellular concentrations of the antisense sufficient to suppress translation on endogenous mRNAs. Therefore a preferred approach utilizes a recombinant DNA construct in which the antisense oligonucleotide is placed under the control of a strong pol III or pol II promoter. The use of such a construct to transfect target cells in the patient will result in the transcription of sufficient amounts of single stranded RNAs that will form complementary base pairs with the endogenous Delta3 transcripts and thereby prevent translation of the Delta3 mRNA. For example, a vector can be introduced in vivo such that it is taken up by a cell and directs the transcription of an antisense RNA. Such a vector can remain episomal or become chromosomally integrated, as long as it can be transcribed to produce the desired antisense RNA. Such vectors can be constructed by recombinant DNA technology methods standard in the art. Vectors can be plasmid, viral, or others known in the art, used for replication and expression in mammalian cells. Expression of the sequence encoding the antisense RNA can be by any promoter known in the art to act in mammalian, preferably human cells. Such promoters can be inducible or constitutive. Such promoters include but are not limited to: the SV40 early promoter region (Bernoist and Chambon (1981) Nature 290:304-310), the promoter contained in the 3′ long terminal repeat of Rous sarcoma virus (Yamamoto et al. (1980) Cell 22:787-797), the herpes thymidine kinase promoter (Wagner et al. (1981) Proc. Natl. Acad. Sci. U.S.A. 78:1441-1445), the regulatory sequences of the metallothionein gene (Brinster et al. (1982) Nature 296:39-42), etc. Any type of plasmid, cosmid, YAC or viral vector can be used to prepare the recombinant DNA construct which can be introduced directly into the tissue site; e.g., the choroid plexus or hypothalamus. Alternatively, viral vectors can be used which selectively infect the desired tissue; (e.g., for brain, herpesvirus vectors may be used), in which case administration may be accomplished by another route (e.g., systematically).

[0637] Likewise, the antisense constructs of the present invention, by antagonizing the normal biological activity of one of the Delta3 proteins, can be used in the modulation of cellular activity both in vivo and for ex vivo tissue cultures.

[0638] Furthermore, the anti-sense techniques (e.g., microinjection of antisense molecules, or transfection with plasmids whose transcripts are anti-sense with regard to a Delta3 mRNA or gene sequence) can be used to investigate the role of Delta3 in developmental events, as well as the normal cellular function of Delta3 in adult tissue. Such techniques can be utilized in cell culture, but can also be used in the creation of transgenic animals, as detailed below.

[0639] Ribozyme molecules designed to catalytically cleave Delta3 mRNA transcripts can also be used to prevent translation of mRNA and expression of Delta3. (See, e.g., PCT International Publication WO 94/11364, published Oct. 4, 1990; Sarver et al., 1990, Science 247:1222-1225). Ribozymes are enzymatic RNA molecules capable of catalyzing the specific cleavage of RNA. The mechanism of ribozyme action involves sequence specific hybridization of the ribozyme molecule to complementary target RNA, followed by an endonucleolytic cleavage. The composition of ribozyme molecules must include one or more sequences complementary to the target gene mRNA, and must include the well known catalytic sequence responsible for mRNA cleavage. For this sequence, see U.S. Pat. No. 5,093,246. As such within the scope of the invention are engineered hammerhead motif ribozyme molecules that specifically and efficiently catalyze endonucleolytic cleavage of RNA sequences encoding Delta3 proteins.

[0640] Specific ribozyme cleavage sites within any potential RNA target are initially identified by scanning the molecule of interest for ribozyme cleavage sites which include the following sequences, GUA, GUU and GUC. Once identified, short RNA sequences of between 15 and 20 ribonucleotides corresponding to the region of the target gene containing the cleavage site may be evaluated for predicted structural features, such as secondary structure, that may render the oligonucleotide sequence unsuitable. The suitability of candidate sequences may also be evaluated by testing their accessibility to hybridization with complementary oligonucleotides, using ribonuclease protection assays.

[0641] While ribozymes that cleave mRNA at site specific recognition sequences can be used to destroy Delta3 mRNAs, the use of hammerhead ribozymes is preferred. Hammerhead ribozymes cleave mRNAs at locations dictated by flanking regions that form complementary base pairs with the target mRNA. The sole requirement is that the target mRNA have the following sequence of two bases: 5′-UG-3′. The construction and production of hammerhead ribozymes is well known in the art and is described more fully in Haseloff and Gerlach (1988) Nature 334:585-591. There are hundreds of potential hammerhead ribozyme cleavage sites within the nucleotide sequence of human Delta3 cDNA. Preferably the ribozyme is engineered so that the cleavage recognition site is located near the 5′ end of the Delta3 mRNA; i.e., to increase efficiency and minimize the intracellular accumulation of non-functional mRNA transcripts.

[0642] The ribozymes of the present invention also include RNA endoribonucleases (hereinafter “Cech-type ribozymes”) such as the one which occurs naturally in Tetrahymena Thermophila (known as the IVS, or L-19 IVS RNA) and which has been extensively described by Thomas Cech and collaborators (Zaug, et al. (1984) Science, 224:574-578; Zaug and Cech (1986) Science, 231:470-475; Zaug, et al. (1986) Nature 324:429-433; PCT Publication WO 88/04300; Been & Cech (1986) Cell 47:207-216). The Cech-type ribozymes have an eight base pair active site which hybridizes to a target RNA sequence whereafter cleavage of the target RNA takes place. The invention encompasses those Cech-type ribozymes which target eight base-pair active site sequences that are present in Delta3.

[0643] As in the antisense approach, the ribozymes can be composed of modified oligonucleotides (e.g., for improved stability, targeting, etc.) and should be delivered to cells which express the Delta3 in vivo e.g., hypothalamus and/or the choroid plexus. A preferred method of delivery involves using a DNA construct “encoding” the ribozyme under the control of a strong constitutive pol III or pol II promoter, so that transfected cells will produce sufficient quantities of the ribozyme to destroy endogenous Delta3 messages and inhibit translation. Because ribozymes unlike antisense molecules, are catalytic, a lower intracellular concentration is required for efficiency.

[0644] Endogenous Delta3 gene expression can also be reduced by inactivating or “knocking out” the Delta3 gene or its promoter using targeted homologous recombination. (e.g., see Smithies et al. (1985) Nature 317:230-234; Thomas & Capecchi (1987) Cell 51:503-512; Thompson et al. (1989) Cell 5:313-321). For example, a mutant, non-functional Delta3 (or a completely unrelated DNA sequence) flanked by DNA homologous to the endogenous Delta3 gene (either the coding regions or regulatory regions of the Delta3 gene) can be used, with or without a selectable marker and/or a negative selectable marker, to transfect cells that express Delta3 in vivo. Insertion of the DNA construct, via targeted homologous recombination, results in inactivation of the Delta3 gene. Such approaches are particularly suited in the agricultural field where modifications to ES (embryonic stem) cells can be used to generate animal offspring with an inactive Delta3 (e.g., see Thomas & Capecchi (1987) and Thompson (1989), supra). However this approach can be adapted for use in humans provided the recombinant DNA constructs are directly administered or targeted to the required site in vivo using appropriate viral vectors, e.g., herpes virus vectors.

[0645] Alternatively, endogenous Delta3 gene expression can be reduced by targeting deoxyribonucleotide sequences complementary to the regulatory region of the Delta3 gene (i.e., the Delta3 promoter and/or enhancers) to form triple helical structures that prevent transcription of the Delta3 gene in target cells in the body. (See generally, Helene, C. (1991) Anticancer Drug Des. 6(6):569-84; Helene, C., et al. (1992) Ann. N.Y. Acad. Sci. 660:27-36; and Maher, L. J. (1992) Bioassays 14(12):807-15).

[0646] Nucleic acid molecules to be used in triple helix formation for the inhibition of transcription are preferably single stranded and composed of deoxyribonucleotides. The base composition of these oligonucleotides should promote triple helix formation via Hoogsteen base pairing rules, which generally require sizable stretches of either purines or pyrimidines to be present on one strand of a duplex. Nucleotide sequences may be pyrimidine-based, which will result in TAT and CGC triplets across the three associated strands of the resulting triple helix. The pyrimidine-rich molecules provide base complementarity to a purine-rich region of a single strand of the duplex in a parallel orientation to that strand. In addition, nucleic acid molecules may be chosen that are purine-rich, for example, containing a stretch of G residues. These molecules will form a triple helix with a DNA duplex that is rich in GC pairs, in which the majority of the purine residues are located on a single strand of the targeted duplex, resulting in CGC triplets across the three strands in the triplex.

[0647] Alternatively, the potential sequences that can be targeted for triple helix formation may be increased by creating a so called “switchback” nucleic acid molecule. Switchback molecules are synthesized in an alternating 5′-3′,3′-5′ manner, such that they base pair with first one strand of a duplex and then the other, eliminating the necessity for a sizable stretch of either purines or pyrimidines to be present on one strand of a duplex.

[0648] Antisense RNA and DNA, ribozyme, and triple helix molecules of the invention may be prepared by any method known in the art for the synthesis of DNA and RNA molecules. These include techniques for chemically synthesizing oligo-deoxyribonucleotides and oligoribonucleotides well known in the art such as for example solid phase phosphoramidite chemical synthesis. Alternatively, RNA molecules may be generated by in vitro and in vivo transcription of DNA sequences encoding the antisense RNA molecule. Such DNA sequences may be incorporated into a wide variety of vectors which incorporate suitable RNA polymerase promoters such as the T7 or SP6 polymerase promoters. Alternatively, antisense cDNA constructs that synthesize antisense RNA constitutively or inducibly, depending on the promoter used, can be introduced stably into cell lines.

[0649] Moreover, various well-known modifications to nucleic acid molecules may be introduced as a means of increasing intracellular stability and half-life. Possible modifications include but are not limited to the addition of flanking sequences of ribonucleotides or deoxyribonucleotides to the 5′ and/or 3′ ends of the molecule or the use of phosphorothioate or 2′ O-methyl rather than phosphodiesterase linkages within the oligodeoxyribonucleotide backbone.

### Delta3, FTHMA-070, Tango85, Tango77, SPOIL, NEOKINE, Tango129 and A259 Recombinant Expression Vectors and Host Cells

[0650] Another aspect of the invention pertains to vectors, preferably expression vectors, containing a nucleic acid encoding Delta3, FTHMA-070, Tango85, Tango77, SPOIL, NEOKINE, Tango129 or A259 (or a portion thereof). As used herein, the term “vector” refers to a nucleic acid molecule capable of transporting another nucleic acid to which it has been linked. One type of vector is a “plasmid”, which refers to a circular double stranded DNA loop into which additional DNA segments can be ligated. Another type of vector is a viral vector, wherein additional DNA segments can be ligated into the viral genome. Certain vectors are capable of autonomous replication in a host cell into which they are introduced (e.g., bacterial vectors having a bacterial origin of replication and episomal mammalian vectors). Other vectors (e.g., non-episomal mammalian vectors) are integrated into the genome of a host cell upon introduction into the host cell, and thereby are replicated along with the host genome. Moreover, certain vectors, expression vectors, are capable of directing the expression of genes to which they are operatively linked. In general, expression vectors of utility in recombinant DNA techniques are often in the form of plasmids (vectors). However, the invention is intended to include such other forms of expression vectors, such as viral vectors (e.g., replication defective retroviruses, adenoviruses and adeno-associated viruses), which serve equivalent functions.

[0651] The recombinant expression vectors of the invention comprise a nucleic acid of the invention in a form suitable for expression of the nucleic acid in a host cell, which means that the recombinant expression vectors include one or more regulatory sequences, selected on the basis of the host cells to be used for expression, which is operatively linked to the nucleic acid sequence to be expressed. Within a recombinant expression vector, “operably linked” is intended to mean that the nucleotide sequence of interest is linked to the regulatory sequence(s) in a manner which allows for expression of the nucleotide sequence (e.g., in an in vitro transcription/translation system or in a host cell when the vector is introduced into the host cell). The term “regulatory sequence” is intended to include promoters, enhancers and other expression control elements (e.g., polyadenylation signals). Such regulatory sequences are described, for example, in Goeddel; Gene Expression Technology: Methods in Enzymology 185, Academic Press, San Diego, Calif. (1990). Regulatory sequences include those which direct constitutive expression of a nucleotide sequence in many types of host cell and those which direct expression of the nucleotide sequence only in certain host cells (e.g., tissue-specific regulatory sequences). It will be appreciated by those skilled in the art that the design of the expression vector can depend on such factors as the choice of the host cell to be transformed, the level of expression of protein desired, etc. The expression vectors of the invention can be introduced into host cells to thereby produce proteins or peptides, including fusion proteins or peptides, encoded by nucleic acids as described herein (e.g., Delta3, FTHMA-070, Tango85, Tango77, SPOIL, NEOKINE, Tango129 or A259 proteins, mutant forms of Delta3, FTHMA-070, Tango85, Tango77, SPOIL, NEOKINE, Tango129 or A259, fusion proteins, etc.).

[0652] The recombinant expression vectors of the invention can be designed for expression of Delta3, FTHMA-070, Tango85, Tango77, SPOIL, NEOKINE, Tango129 or A259 in prokaryotic or eukaryotic cells, e.g., bacterial cells such as E. coli, insect cells (using baculovirus expression vectors) yeast cells or mammalian cells. Suitable host cells are discussed further in Goeddel, Gene Expression Technology: Methods in Enzymology 185, Academic Press, San Diego, Calif. (1990). Alternatively, the recombinant expression vector can be transcribed and translated in vitro, for example using T7 promoter regulatory sequences and T7 polymerase.

[0653] Expression of proteins in prokaryotes is most often carried out in E. coli with vectors containing constitutive or inducible promoters directing the expression of either fusion or non-fusion proteins. Fusion vectors add a number of amino acids to a protein encoded therein, usually to the amino terminus of the recombinant protein. Such fusion vectors typically serve three purposes: 1) to increase expression of recombinant protein; 2) to increase the solubility of the recombinant protein; and 3) to aid in the purification of the recombinant protein by acting as a ligand in affinity purification. Often, in fusion expression vectors, a proteolytic cleavage site is introduced at the junction of the fusion moiety and the recombinant protein to enable separation of the recombinant protein from the fusion moiety subsequent to purification of the fusion protein. Such enzymes, and their cognate recognition sequences, include Factor Xa, thrombin and enterokinase. Typical fusion expression vectors include pGEX (Pharmacia Biotech Inc; Smith and Johnson (1988) Gene 67:31-40), pMAL (New England Biolabs, Beverly, Mass.) and pRIT5 (Pharmacia, Piscataway, N.J.) which fuse glutathione S-transferase (GST), maltose E binding protein, or protein A, respectively, to the target recombinant protein.

[0654] Examples of suitable inducible non-fusion E. coli expression vectors include pTrc (Amann et al., (1988) Gene 69:301-315) and pET 11d (Studier et al., Gene Expression Technology: Methods in Enzymology 185, Academic Press, San Diego, Calif. (1990) 60-89). Target gene expression from the pTrc vector relies on host RNA polymerase transcription from a hybrid trp-lac fusion promoter. Target gene expression from the pET 11d vector relies on transcription from a T7 gn10-lac fusion promoter mediated by a coexpressed viral RNA polymerase (T7 gn1). This viral polymerase is supplied by host strains BL21(DE3) or HMS174(DE3) from a resident λ prophage harboring a 17 gn1 gene under the transcriptional control of the lacUV 5 promoter.

[0655] One strategy to maximize recombinant protein expression in E. coli is to express the protein in a host bacteria with an impaired capacity to proteolytically cleave the recombinant protein (Gottesman, Gene Expression Technology: Methods in Enzymology 185, Academic Press, San Diego, Calif. (1990) 119-128). Another strategy is to alter the nucleic acid sequence of the nucleic acid to be inserted into an expression vector so that the individual codons for each amino acid are those preferentially utilized in E. coli (Wada et al. (1992) Nucleic Acids Res. 20:2111-2118). Such alteration of nucleic acid sequences of the invention can be carried out by standard DNA synthesis techniques.

[0656] In another embodiment, the Delta3, FTHMA-070, Tango85, Tango77, SPOIL, NEOKINE, Tango129 or A259 expression vector is a yeast expression vector. Examples of vectors for expression in yeast S. cerivisae include pYepSec1 (Baldari et al. (1987) EMBO J. 6:229-234), pMFa (Kurjan and Herskowitz, (1982) Cell 30:933-943), pJRY88 (Schultz et al. (1987) Gene 54:113-123), pYES2 (Invitrogen Corporation, San Diego, Calif.), and picZ (InVitrogen Corp, San Diego, Calif.).

[0657] Alternatively, Delta3, FTHMA-070, Tango85, Tango77, SPOIL, NEOKINE, Tango129 or A259 can be expressed in insect cells using baculovirus expression vectors. Baculovirus vectors available for expression of proteins in cultured insect cells (e.g., Sf 9 cells) include the pAc series (Smith et al. (1983) Mol. Cell. Biol. 3:2156-2165) and the pVL series (Lucklow and Summers (1989) Virology 170:31-39).

[0658] In yet another embodiment, a nucleic acid of the invention is expressed in mammalian cells using a mammalian expression vector. Examples of mammalian expression vectors include pCDM8 (Seed (1987) Nature 329:840) and pMT2PC (Kaufman et al. (1987) EMBO J. 6:187-195). When used in mammalian cells, the expression vector's control functions are often provided by viral regulatory elements. For example, commonly used promoters are derived from polyoma, Adenovirus 2, cytomegalovirus and Simian Virus 40. For other suitable expression systems for both prokaryotic and eukaryotic cells see chapters 16 and 17 of Sambrook et al. (1989) Cold Spring Harbor Laboratory (supra).

[0659] In another embodiment, the recombinant mammalian expression vector is capable of directing expression of the nucleic acid preferentially in a particular cell type (e.g., tissue-specific regulatory elements are used to express the nucleic acid). Tissue-specific regulatory elements are known in the art. Non-limiting examples of suitable tissue-specific promoters include the albumin promoter (liver-specific; Pinkert et al. (1987) Genes Dev. 1:268-277), lymphoid-specific promoters (Calame and Eaton (1988) Adv. Immunol. 43:235-275), in particular promoters of T cell receptors (Winoto and Baltimore (1989) EMBO J. 8:729-733) and immunoglobulins (Banerji et al. (1983) Cell 33:729-740; Queen and Baltimore (1983) Cell 33:741-748), neuron-specific promoters (e.g., the neurofilament promoter; Byrne and Ruddle (1989) Proc. Natl. Acad. Sci. USA 86:5473-5477), pancreas-specific promoters (Edlund et al. (1985) Science 230:912-916), and mammary gland-specific promoters (e.g., milk whey promoter; U.S. Pat. No. 4,873,316 and European Application Publication No. 264,166). Developmentally-regulated promoters are also encompassed, for example the murine hox promoters (Kessel and Gruss (1990) Science 249:374-379) and the α-fetoprotein promoter (Camper and Tilghman (1989) Genes Dev. 3:537-546).

[0660] The invention further provides a recombinant expression vector comprising a DNA molecule of the invention cloned into the expression vector in an antisense orientation. That is, the DNA molecule is operatively linked to a regulatory sequence in a manner which allows for expression (by transcription of the DNA molecule) of an RNA molecule which is antisense to Delta3, FTHMA-070, Tango85, Tango77, SPOIL, NEOKINE, Tango129 or A259 mRNA. Regulatory sequences operatively linked to a nucleic acid cloned in the antisense orientation can be chosen which direct the continuous expression of the antisense RNA molecule in a variety of cell types, for instance viral promoters and/or enhancers, or regulatory sequences can be chosen which direct constitutive, tissue specific or cell type specific expression of antisense RNA. The antisense expression vector can be in the form of a recombinant plasmid, phagemid or attenuated virus in which antisense nucleic acids are produced under the control of a high efficiency regulatory region, the activity of which can be determined by the cell type into which the vector is introduced. For a discussion of the regulation of gene expression using antisense genes See Weintraub et al., Reviews—Trends in Genetics, Vol. 1(1) 1986.

[0661] Another aspect of the invention pertains to host cells into which a recombinant expression vector of the invention has been introduced.

[0662] Another aspect of the invention pertains to host cells into which a SPOIL nucleic acid molecule of the invention is introduced, e.g., a SPOIL nucleic acid molecule within a recombinant expression vector or a SPOIL nucleic acid molecule in a form suitable for homologous recombination in the genome of a host cell (e.g., a SPOIL nucleic acid molecule which includes SPOIL nucleotide sequences and additional 5′ and 3′ flanking sequences necessary for homologous recombination).

[0663] The terms “host cell” and “recombinant host cell” are used interchangeably herein. It is understood that such terms refer not only to the particular subject cell but to the progeny or potential progeny of such a cell. Because certain modifications may occur in succeeding generations due to either mutation or environmental influences, such progeny may not, in fact, be identical to the parent cell, but are still included within the scope of the term as used herein.

[0664] A host cell can be any prokaryotic or eukaryotic cell. For example, Delta3, FTHMA-070, Tango85, Tango77, SPOIL, NEOKINE, Tango129 or A259 protein can be expressed in bacterial cells such as E. coli, insect cells, yeast or mammalian cells (such as Chinese hamster ovary cells (CHO) or COS cells). Other suitable host cells are known to those skilled in the art.

[0665] Vector DNA can be introduced into prokaryotic or eukaryotic cells via conventional transformation or transfection techniques. As used herein, the terms “transformation” and “transfection” are intended to refer to a variety of art-recognized techniques for introducing foreign nucleic acid (e.g., DNA) into a host cell, including calcium phosphate or calcium chloride co-precipitation, DEAE-dextran-mediated transfection, lipofection, or electroporation. Suitable methods for transforming or transfecting host cells can be found in Sambrook, et al. (supra), and other laboratory manuals.

[0666] For stable transfection of mammalian cells, it is known that, depending upon the expression vector and transfection technique used, only a small fraction of cells may integrate the foreign DNA into their genome. In order to identify and select these integrants, a gene that encodes a selectable marker (e.g., resistance to antibiotics) is generally introduced into the host cells along with the gene of interest. Preferred selectable markers include those which confer resistance to drugs, such as G418, hygromycin and methotrexate. Nucleic acid encoding a selectable marker can be introduced into a host cell on the same vector as that encoding Delta3, FTHMA-070, Tango85, Tango77, SPOIL, NEOKINE, Tango129 or A259 or can be introduced on a separate vector. Cells stably transfected with the introduced nucleic acid can be identified by drug selection (e.g., cells that have incorporated the selectable marker gene will survive, while the other cells die).

[0667] In another embodiment, the expression characteristics of an endogenous (e.g., Delta3) nucleic acid within a cell, cell line or microorganism may be modified by inserting a DNA regulatory element heterologous to the endogenous gene of interest into the genome of a cell, stable cell line or cloned microorganism such that the inserted regulatory element is operatively linked with the endogenous gene (e.g., Delta3) and controls, modulates or activates the endogenous gene. For example, endogenous Delta3 which is normally “transcriptionally silent”, i.e., Delta3 which is normally not expressed, or is expressed only at very low levels in a cell line or microorganism, may be activated by inserting a regulatory element which is capable of promoting the expression of a normally expressed gene product in that cell line or microorganism. Alternatively, transcriptionally silent, endogenous Delta3 may be activated by insertion of a promiscuous regulatory element that works across cell types.

[0668] A heterologous regulatory element may be inserted into a stable cell line or cloned microorganism, such that it is operatively linked with and activates expression of endogenous Delta3, using techniques, such as targeted homologous recombination, which are well known to those of skill in the art, and described e.g., in Chappel, U.S. Pat. No. 5,272,071, incorporated herein by reference in its entirety; PCT publication NO: WO 91/06667, published May 16, 1991.

[0669] A host cell of the invention, such as a prokaryotic or eukaryotic host cell in culture, can be used to produce (i.e., express) Delta3, FTHMA-070, Tango85, Tango77, SPOIL, NEOKINE, Tango129 or A259 protein. Accordingly, the invention further provides methods for producing Delta3, FTHMA-070, Tango85, Tango77, SPOIL, NEOKINE, Tango129 or A259 protein using the host cells of the invention. In one embodiment, the method comprises culturing the host cell of invention (into which a recombinant expression vector encoding Delta3, FTHMA-070, Tango85, Tango77, SPOIL, NEOKINE, Tango129 or A259 has been introduced) in a suitable medium such that Delta3, FTHMA-070, Tango85, Tango77, SPOIL, NEOKINE, Tango129 or A259 protein is produced. In another embodiment, the method further comprises isolating Delta3, FTHMA-070, Tango85, Tango77, SPOIL, NEOKINE, Tango129 or A259 from the medium or the host cell.

[0670] The host cells of the invention can also be used to produce nonhuman transgenic animals. For example, in one embodiment, a host cell of the invention is a fertilized oocyte or an embryonic stem cell into which Delta3, FTHMA-070, Tango85, Tango77, SPOIL, NEOKINE, Tango129 or A259-coding sequences have been introduced. Such host cells can then be used to create non-human transgenic animals in which exogenous Delta3, FTHMA-070, Tango85, Tango77, SPOIL, NEOKINE, Tango129 or A259 sequences have been introduced into their genome or homologous recombinant animals in which endogenous Delta3, FTHMA-070, Tango85, Tango77, SPOIL, NEOKINE, Tango129 or A259 sequences have been altered. Such animals are useful for studying the function and/or activity of Delta3, FTHMA-070, Tango85, Tango77, SPOIL, NEOKINE, Tango129 or A259 and for identifying and/or evaluating modulators of FTHMA-070, Tango85, Tango77, SPOIL, NEOKINE, Tango129 or A259 activity. As used herein, a “transgenic animal” is a non-human animal, preferably a mammal, more preferably a rodent such as a rat or mouse, in which one or more of the cells of the animal includes a transgene. Other examples of transgenic animals include non-human primates, sheep, dogs, cows, goats, chickens, amphibians, etc. A transgene is exogenous DNA which is integrated into the genome of a cell from which a transgenic animal develops and which remains in the genome of the mature animal, thereby directing the expression of an encoded gene product in one or more cell types or tissues of the transgenic animal. As used herein, an “homologous recombinant animal” is a non-human animal, preferably a mammal, more preferably a mouse, in which an endogenous Delta3, FTHMA-070, Tango85, Tango77, SPOIL, NEOKINE, Tango129 or A259 gene has been altered by homologous recombination between the endogenous gene and an exogenous DNA molecule introduced into a cell of the animal, e.g., an embryonic cell of the animal, prior to development of the animal.

[0671] A transgenic animal of the invention can be created by introducing Delta3, FTHMA-070, Tango85, Tango77, SPOIL, NEOKINE, Tango129 or A259-encoding nucleic acid into the male pronuclei of a fertilized oocyte, e.g., by microinjection, retroviral infection, and allowing the oocyte to develop in a pseudopregnant female foster animal. The Delta3, FTHMA-070, T85 or A259 cDNA sequence can be introduced as a transgene into the genome of a non-human animal. The Tango-77 cDNA sequence e.g., that of (SEQ ID NO:71, SEQ ID NO:73, SEQ ID NO:76; SEQ ID NO:80 or the cDNA of ATCC 98807) can be introduced as a transgene into the genome of a non-human animal. The human SPOIL cDNA sequence of SEQ ID NO:101, SEQ ID NO:104, the DNA insert of the plasmid deposited with ATCC as Accession Number 98883, or the DNA insert of the plasmid deposited with ATCC as Accession Number 98984, can be introduced as a transgene into the genome of a non-human animal. The NEOKINE-1 cDNA sequence of SEQ ID NO:115 can be introduced as a transgene into the genome of a non-human animal. Alternatively, a nonhuman homologue of a human NEOKINE-1 gene, such as a mouse NEOKINE-1 gene (SEQ ID NO:118), a rat NEOKINE-1 gene (SEQ ID NO:121), or a macaque NEOKINE cDNA (SEQ ID NO:124), can be used as a transgene. The T129 cDNA sequence e.g., that of (SEQ ID NO:137 or SEQ ID NO:139) can be introduced as a transgene into the genome of a non-human animal.

[0672] Alternatively, a nonhuman homologue of the human Delta3, FTHMA-070, Tango85, Tango77, SPOIL, NEOKINE, Tango129 or A259 gene, such as a mouse Delta3, FTHMA-070, Tango85, Tango77, SPOIL, NEOKINE, Tango129 or A259 gene, can be isolated based on hybridization to the human Delta3, FTHMA-070, Tango85, Tango77, SPOIL, NEOKINE, Tango129 or A259 cDNA and used as a transgene. Intronic sequences and polyadenylation signals can also be included in the transgene to increase the efficiency of expression of the transgene. A tissue-specific regulatory sequence(s) can be operably linked to the Delta3, FTHMA-070, Tango85, Tango77, SPOIL, NEOKINE, Tango129 or A259 transgene to direct expression of Delta3, FTHMA-070, Tango85, Tango77, SPOIL, NEOKINE, Tango129 or A259 protein to particular cells. Methods for generating transgenic animals via embryo manipulation and microinjection, particularly animals such as mice, have become conventional in the art and are described, for example, in U.S. Pat. Nos. 4,736,866 and 4,870,009, U.S. Pat. No. 4,873,191 and in Hogan, Manipulating the Mouse Embryo, (Cold Spring Harbor Laboratory Press, Cold Spring Harbor, N.Y., 1986). Similar methods are used for production of other transgenic animals. A transgenic founder animal can be identified based upon the presence of the Delta3, FTHMA-070, Tango85, Tango77, SPOIL, NEOKINE, Tango129 or A259 transgene in its genome and/or expression of Delta3, FTHMA-070, Tango85, Tango77, SPOIL, NEOKINE, Tango129 or A259 mRNA in tissues or cells of the animals. A transgenic founder animal can then be used to breed additional animals carrying the transgene. Moreover, transgenic animals carrying a transgene encoding Delta3, FTHMA-070, Tango85, Tango77, SPOIL, NEOKINE, Tango129 or A259 can further be bred to other transgenic animals carrying other transgenes.

[0673] To create an homologous recombinant animal, a vector is prepared which contains at least a portion of a Delta3, FTHMA-070, Tango85, Tango77, SPOIL, NEOKINE, Tango129 or A259 gene (e.g., a human or a non-human homolog of the Delta3, FTHMA-070, Tango85, Tango77, SPOIL, NEOKINE, Tango129 or A259 gene, e.g., a murine Delta3, FTHMA-070, Tango85, Tango77, SPOIL, NEOKINE, Tango129 or A259 gene) into which a deletion, addition or substitution has been introduced to thereby alter, e.g., functionally disrupt, the Delta3, FTHMA-070, Tango85, Tango77, SPOIL, NEOKINE, Tango129 or A259 gene. In a preferred embodiment, the vector is designed such that, upon homologous recombination, the endogenous Delta3, FTHMA-070, Tango85, Tango77, SPOIL, NEOKINE, Tango129 or A259 gene is functionally disrupted (i.e., no longer encodes a functional protein; also referred to as a “knock out” vector). Alternatively, the vector can be designed such that, upon homologous recombination, the endogenous Delta3, FTHMA-070, Tango85, Tango77, SPOIL, NEOKINE, Tango129 or A259 gene is mutated or otherwise altered but still encodes functional protein (e.g., the upstream regulatory region can be altered to thereby alter the expression of the endogenous Delta3, FTHMA-070, Tango85, Tango77, SPOIL, NEOKINE, Tango129 or A259 protein). In the homologous recombination vector, the altered portion of the Delta3, FTHMA-070, Tango85, Tango77, SPOIL, NEOKINE, Tango129 or A259 gene is flanked at its 5′ and 3′ ends by additional nucleic acid of the Delta3, FTHMA-070, Tango85, Tango77, SPOIL, NEOKINE, Tango129 or A259 gene to allow for homologous recombination to occur between the exogenous Delta3, FTHMA-070, Tango85, Tango77, SPOIL, NEOKINE, Tango129 or A259 gene carried by the vector and an endogenous Delta3, FTHMA-070, Tango85, Tango77, SPOIL, NEOKINE, Tango129 or A259 gene in an embryonic stem cell. The additional flanking Delta3, FTHMA-070, Tango85, Tango77, SPOIL, NEOKINE, Tango129 or A259 nucleic acid is of sufficient length for successful homologous recombination with the endogenous gene. Typically, several kilobases of flanking DNA (both at the 5′ and 3′ ends) are included in the vector (see e.g., Thomas and Capecchi (1987) Cell 51:503 for a description of homologous recombination vectors). The vector is introduced into an embryonic stem cell line (e.g., by electroporation) and cells in which the introduced Delta3, FTHMA-070, Tango85, Tango77, SPOIL, NEOKINE, Tango129 or A259 gene has homologously recombined with the endogenous Delta3, FTHMA-070, Tango85, Tango77, SPOIL, NEOKINE, Tango129 or A259 gene are selected (see e.g., Li et al. (1992) Cell 69:915). The selected cells are then injected into a blastocyst of an animal (e.g., a mouse) to form aggregation chimeras (see, e.g., Bradley in Teratocarcinomas and Embryonic Stem Cells: A Practical Approach, Robertson, ed. (IRL, Oxford, 1987) pp. 113-152). A chimeric embryo can then be implanted into a suitable pseudopregnant female foster animal and the embryo brought to term. Progeny harboring the homologously recombined DNA in their germ cells can be used to breed animals in which all cells of the animal contain the homologously recombined DNA by germline transmission of the transgene. Methods for constructing homologous recombination vectors and homologous recombinant animals are described further in Bradley (1991) Current Opinion in Bio/Technology 2:823-829 and in PCT Publication Nos. WO 90/11354, WO 91/01140, WO 92/0968, and WO 93/04169.

[0674] In another embodiment, transgenic non-humans animals can be produced which contain selected systems which allow for regulated expression of the transgene. One example of such a system is the cre/loxP recombinase system of bacteriophage P1. For a description of the cre/loxP recombinase system, see, e.g., Lakso et al. (1992) Proc. Natl. Acad. Sci. USA 89:6232-6236. Another example of a recombinase system is the FLP recombinase system of Saccharomyces cerevisiae (O'Gorman et al. (1991) Science 251:1351-1355. If a cre/loxP recombinase system is used to regulate expression of the transgene, animals containing transgenes encoding both the Cre recombinase and a selected protein are required. Such animals can be provided through the construction of “double” transgenic animals, e.g., by mating two transgenic animals, one containing a transgene encoding a selected protein and the other containing a transgene encoding a recombinase.

[0675] Clones of the non-human transgenic animals described herein can also be produced according to the methods described in Wilmut et al. (1997) Nature 385:810-813 and PCT Publication Nos. WO 97/07668 and WO 97/07669. In brief, a cell, e.g., a somatic cell, from the transgenic animal can be isolated and induced to exit the growth cycle and enter Gₒ phase. The quiescent cell can then be fused, e.g., through the use of electrical pulses, to an enucleated oocyte from an animal of the same species from which the quiescent cell is isolated. The reconstructed oocyte is then cultured such that it develops to morula or blastocyte and then transferred to pseudopregnant female foster animal. The offspring borne of this female foster animal will be a clone of the animal from which the cell, e.g., the somatic cell, is isolated.

### Delta3 Peptides of the Present Invention

[0676] The present invention also makes available Delta3 polypeptides which are isolated from, or otherwise substantially free of other cellular proteins, especially other signal transduction factors and/or transcription factors which may normally be associated with the Delta3 polypeptide. In general, polypeptides of the invention exhibit an activity of a Delta3 protein. The invention provides various forms of Delta3 proteins, specifically including all of the Delta3 proteins encoded by a nucleic acid of the invention, as described above.

[0677] In one embodiment, a polypeptide of the invention is a polypeptide that is a variant of a polypeptide of the invention can be assayed for: (1) the ability to form protein:protein interactions with proteins in a signaling pathway of the polypeptide of the invention; (2) the ability to bind a ligand of the polypeptide of the invention; or (3) the ability to bind to an intracellular target protein of the polypeptide of the invention. In yet another preferred embodiment, the mutant polypeptide can be assayed for the ability to modulate cellular proliferation, cellular migration or chemotaxis, or cellular differentiation.

[0678] Full-length proteins or fragments corresponding to one or more particular motifs and/or domains or to arbitrary sizes, for example, at least about 5, 10, 25, 50, 75, 100, 125, 150 amino acids in length are within the scope of the present invention. The invention encompasses all proteins encoded by the nucleic acids described in the above section describing the nucleic acids of the invention.

[0679] For example, isolated Delta3 polypeptides can include all or a portion of an amino acid sequences corresponding to a Delta3 polypeptide represented in SEQ ID NOs: 2, 25, 28, 30, 32, 34, 36, 38, 40, 42, 44 or 46, or the amino acid sequence encoded by the cDNA of a clone deposited with the ATCC® as Accession Number 98348. Isolated portions of Delta3 proteins can be obtained, for example, by screening peptides recombinantly produced from the corresponding fragment of the nucleic acid encoding such peptides. In addition, fragments can be chemically synthesized using techniques known in the art such as conventional Merrifield solid phase f-Moc or t-Boc chemistry. For example, a Delta3 polypeptide of the present invention may be divided into fragments of desired length with no overlap of the fragments, or preferably divided into overlapping fragments of a desired length. The fragments can be produced (recombinantly or by chemical synthesis) and tested to identify those peptidyl fragments which can function as either agonists or antagonists of a wild-type (e.g., “authentic”) Delta3 protein.

[0680] In one embodiment, the Delta3 polypeptide of the invention has an overall amino acid sequence similarity or identity of at least about 70%, at least about 75%, at least about 80%, at least about 85%, at least about 90%, at least about 95%, at least about 98%, or at least about 99% with the amino acid sequence SEQ ID NOs: 2, 25, 28, 30, 32, 34, 36, 38, 40, 42, 44 or 46, or the amino acid sequence encoded by the cDNA of a clone deposited with the ATCC® as Accession Number 98348. In a particularly preferred embodiment a Delta3 protein has the amino acid sequence SEQ ID NOs: 2, 25, 28, 30, 32, 34, 36, 38, 40, 42, 44 or 46, or the amino acid sequence of the cDNA of a clone deposited with the ATCC® as Accession Number 98348. In other particularly preferred embodiments, the Delta3 protein has a Delta3 activity.

[0681] The present invention further pertains to forms of one of the subject Delta3 polypeptides which are encoded by nucleotide sequences derived from a mammalian organism, and which have amino acid sequences evolutionarily related to the Delta3 protein represented in SEQ ID NOs: 2, 25, 28, 30, 32, 34, 36, 38, 40, 42, 44 or 46, or the amino acid sequence encoded by the cDNA of a clone deposited with the ATCC® as Accession Number 98348. Such recombinant Delta3 polypeptides can, in certain embodiments, preferably are capable of functioning in one of either role of an agonist or antagonist of at least one biological activity of a wild-type (“authentic”) Delta3 protein of the appended sequence listing. The term “evolutionarily related to”, with respect to amino acid sequences of human Delta3 proteins, refers to both polypeptides having amino acid sequences which have arisen naturally, and also to mutational variants of the Delta3 polypeptides which are derived, for example, by combinatorial mutagenesis. Such evolutionarily derived Delta3 polypeptides preferred by the present invention have a Delta3 activity and are at least 80% homologous and more preferably 85% identical and most preferably 90% identical with the amino acid sequence of SEQ ID NOs: 2, 25, 28, 30, 32, 34, 36, 38, 40, 42, 44 or 46, or the amino acid sequence encoded by the cDNA of a clone deposited with the ATCC® as Accession Number 98348. In a particularly preferred embodiment, a Delta3 protein comprises the amino acid coding sequence of SEQ ID NOs: 2, 25, 28, 30, 32, 34, 36, 38, 40, 42, 44 or 46, or the amino acid sequence of the cDNA of a clone deposited with the ATCC® as Accession Number 98348.

[0682] The present invention further pertains to methods of producing the subject Delta3 polypeptides. For example, a host cell transfected with a nucleic acid vector directing expression of a nucleotide sequence encoding the subject polypeptides can be cultured under appropriate conditions to allow expression of the peptide to occur. The cells may be harvested, lysed and the protein isolated. A cell culture includes host cells, media and other byproducts. Suitable media for cell culture are well known in the art. The recombinant Delta3 polypeptide can be isolated from cell culture medium, host cells, or both using techniques known in the art for purifying proteins including ion-exchange chromatography, gel filtration chromatography, ultrafiltration, electrophoresis, and immunoaffinity purification with antibodies specific for such peptide. In a preferred embodiment, the recombinant Delta3 polypeptide is a fusion protein containing a domain which facilitates its purification, such as GST fusion protein or poly(His) fusion protein.

[0683] Moreover, it will be generally appreciated that, under certain circumstances, it may be advantageous to provide variants of one of the subject Delta3 polypeptides which function in a limited capacity as one of either a Delta3 agonist (mimetic) or a Delta3 antagonist, in order to promote or inhibit only a subset of the biological activities of the naturally-occurring form of the protein. Thus, specific biological effects can be elicited by treatment with a variant having a limited function, and with fewer side effects relative to treatment with agonists or antagonists which are directed to all of the biological activities of naturally-occurring forms of Delta3 proteins.

[0684] Variants and/or mutants of each of the subject Delta3 proteins can be generated by mutagenesis, such as by discrete point mutation(s), or by truncation. For instance, mutation can give rise to homologs which retain substantially the same, or merely a subset, of the biological activity of the Delta3 polypeptide from which it was derived. Alternatively, antagonistic forms of the protein can be generated which are able to inhibit the function of the naturally-occurring form of the protein, such as by competitively binding to a downstream or upstream member of the Delta3 cascade which includes the Delta3 protein. In addition, agonistic forms of the protein may be generated which are constitutively active.

[0685] The recombinant Delta3 polypeptides of the present invention also include homologs of the authentic Delta3 proteins, such as versions of those protein which are resistant to proteolytic cleavage, as for example, due to mutations which alter ubiquitination or other enzymatic targeting associated with the protein.

[0686] Delta3 polypeptides may also be chemically modified to create Delta3 derivatives by forming covalent or aggregate conjugates with other chemical moieties, such as glycosyl groups, lipids, phosphate, acetyl groups and the like. Covalent derivatives of Delta3 proteins can be prepared by linking the chemical moieties to functional groups on amino acid sidechains of the protein or at the N-terminus or at the C-terminus of the polypeptide.

[0687] Modification of the structure of the subject Delta3 polypeptides can be for such purposes as enhancing therapeutic or prophylactic efficacy, stability (e.g., ex vivo shelf life and resistance to proteolytic degradation in vivo), or post-translational modifications (e.g., to alter phosphorylation pattern of protein). Such modified peptides, when designed to retain at least one activity of the naturally-occurring form of the protein, or to produce specific antagonists thereof, are considered functional equivalents of the Delta3 polypeptides described in more detail herein. Such modified peptides can be produced, for instance, by amino acid substitution, deletion, or addition.

[0688] For example, it is reasonable to expect that an isolated replacement of a leucine with an isoleucine or valine, an aspartate with a glutamate, a threonine with a serine, or a similar replacement of an amino acid with a structurally related amino acid (i.e. isosteric and/or isoelectric mutations) will not have a major effect on the biological activity of the resulting molecule. Conservative replacements are those that take place within a family of amino acids that are related in their side chains. Genetically encoded amino acids are can be divided into four families: (1) acidic=aspartate, glutamate; (2) basic=lysine, arginine, histidine; (3) nonpolar=alanine, valine, leucine, isoleucine, proline, phenylalanine, methionine, tryptophan; and (4) uncharged polar=glycine, asparagine, glutamine, cysteine, serine, threonine, tyrosine. In similar fashion, the amino acid repertoire can be grouped as (1) acidic=aspartate, glutamate; (2) basic=lysine, arginine histidine, (3) aliphatic=glycine, alanine, valine, leucine, isoleucine, serine, threonine, with serine and threonine optionally be grouped separately as aliphatic-hydroxyl; (4) aromatic=phenylalanine, tyrosine, tryptophan; (5) amide=asparagine, glutamine; and (6) sulfur-containing=cysteine and methionine. (See, for example, Biochemistry, 4th ed., Ed. by L. Stryer, WH Freeman and Co.: 1995). Whether a change in the amino acid sequence of a peptide results in a functional Delta3 homolog (e.g., functional in the sense that the resulting polypeptide mimics or antagonizes the wild-type form) can be readily determined by assessing the ability of the variant peptide to produce a response in cells in a fashion similar to the wild-type protein, or competitively inhibit such a response. Polypeptides in which more than one replacement has taken place can readily be tested in the same manner.

[0689] This invention further contemplates a method for generating sets of combinatorial mutants of the subject Delta3 proteins as well as truncation mutants, and is especially useful for identifying potential functional variant sequences (e.g., homologs). The purpose of screening such combinatorial libraries is to generate, for example, novel Delta3 homologs which can act as either agonists or antagonist, or alternatively, possess novel activities all together.

[0690] In one embodiment, the variegated library of Delta3 variants is generated by combinatorial mutagenesis at the nucleic acid level, and is encoded by a variegated gene library. For instance, a mixture of synthetic oligonucleotides can be enzymatically ligated into gene sequences such that the degenerate set of potential Delta3 sequences are expressible as individual polypeptides, or alternatively, as a set of larger fusion proteins (e.g., for phage display) containing the set of Delta3 sequences therein.

[0691] There are many ways by which such libraries of potential Delta3 variants can be generated from a degenerate oligonucleotide sequence. Chemical synthesis of a degenerate gene sequence can be carried out in an automatic DNA synthesizer, and the synthetic genes then ligated into an appropriate expression vector. The purpose of a degenerate set of genes is to provide, in one mixture, all of the sequences encoding the desired set of potential Delta3 sequences. The synthesis of degenerate oligonucleotides is well known in the art (see for example, Narang, S A (1983) Tetrahedron 39:3; Itakura et al. (1981) Recombinant DNA, Proc. 3rd Cleveland Sympos. Macromolecules, ed. AG Walton, Amsterdam: Elsevier ppg. 273-289; Itakura et al. (1984) Annu. Rev. Biochem. 53:323; Itakura et al. (1984) Science 198:1056; Ike et al. (1983) Nucleic Acid Res. 11:477. Such techniques have been employed in the directed evolution of other proteins (see, for example, Scott et al. (1990) Science 249:386-390; Roberts et al. (1992) PNAS 89:2429-2433; Devlin et al. (1990) Science 249: 404-406; Cwirla et al. (1990) PNAS 87: 6378-6382; as well as U.S. Pat. Nos. 5,223,409, 5,198,346, and 5,096,815).

[0692] Likewise, a library of coding sequence fragments can be provided for a Delta3 clone in order to generate a variegated population of Delta3 fragments for screening and subsequent selection of bioactive fragments. A variety of techniques are known in the art for generating such libraries, including chemical synthesis. In one embodiment, a library of coding sequence fragments can be generated by (i) treating a double stranded PCR fragment of a Delta3 coding sequence with a nuclease under conditions wherein nicking occurs only about once per molecule; (ii) denaturing the double stranded DNA; (iii) renaturing the DNA to form double stranded DNA which can include sense/antisense pairs from different nicked products; (iv) removing single stranded portions from reformed duplexes by treatment with S1 nuclease; and (v) ligating the resulting fragment library into an expression vector. By this exemplary method, an expression library can be derived which codes for N-terminal, C-terminal and internal fragments of various sizes.

[0693] A wide range of techniques are known in the art for screening gene products of combinatorial libraries made by point mutations or truncation, and for screening cDNA libraries for gene products having a certain property. Such techniques will be generally adaptable for rapid screening of the gene libraries generated by the combinatorial mutagenesis of Delta3 homologs. The most widely used techniques for screening large gene libraries typically comprises cloning the gene library into replicable expression vectors, transforming appropriate cells with the resulting library of vectors, and expressing the combinatorial genes under conditions in which detection of a desired activity facilitates relatively easy isolation of the vector encoding the gene whose product was detected. Each of the illustrative assays described below are amenable to high through-put analysis as necessary to screen large numbers of degenerate Delta3 sequences created by combinatorial mutagenesis techniques.

[0694] Combinatorial mutagenesis has a potential to generate very large libraries of mutant proteins, e.g., in the order of 1026 molecules. Combinatorial libraries of this size may be technically challenging to screen even with high throughput screening assays. To overcome this problem, a new technique has been developed recently, recrusive ensemble mutagenesis (REM), which allows one to avoid the very high proportion of non-functional proteins in a random library and simply enhances the frequency of functional proteins, thus decreasing the complexity required to achieve a useful sampling of sequence space. REM is an algorithm which enhances the frequency of functional mutants in a library when an appropriate selection or screening method is employed (Arkin and Yourvan, 1992, PNAS USA 89:7811-7815; Yourvan et al., 1992, Parallel Problem Solving from Nature, 2., In Maenner and Manderick, eds., Elsevir Publishing Co., Amsterdam, pp. 401-410; Delgrave et al., 1993, Protein Engineering 6(3):327-331).

[0695] The invention also provides for reduction of the Delta3 proteins to generate mimetics, e.g., peptide or non-peptide agents, which are able to bind to a Delta3 protein and/or to disrupt binding of a Delta3 polypeptide of the present invention with either upstream or downstream components of a Delta/Notch signaling cascade, such as binding proteins or interactors. Thus, such mutagenic techniques as described above are also useful to map the determinants of the Delta3 proteins which participate in protein-protein interactions involved in, for example, binding of the subject Delta3 polypeptide to proteins which may function upstream (including both activators and repressors of its activity) or to proteins or nucleic acids which may function downstream of the Delta3 polypeptide, whether they are positively or negatively regulated by it, for example, Notch. To illustrate, the critical residues of a subject Delta3 polypeptide which are involved in molecular recognition of, for example, the Notch gene product or other component upstream or downstream of a Delta3 gene can be determined and used to generate Delta-derived peptidomimetics which competitively inhibit binding of the authentic Delta3 protein with that moiety. By employing, for example, scanning mutagenesis to map the amino acid residues of each of the subject Delta3 proteins which are involved in binding other extracellular proteins, peptidomimetic compounds can be generated which mimic those residues of the Delta3 protein which facilitate the interaction. Such mimetics may then be used to interfere with the normal function of a Delta3 protein. For instance, non-hydrolyzable peptide analogs of such residues can be generated using benzodiazepine (e.g., see Freidinger et al. in Peptides: Chemistry and Biology, G. R. Marshall ed., ESCOM Publisher: Leiden, Netherlands, 1988), azepine (e.g., see Huffman et al. in Peptides: Chemistry and Biology, G. R. Marshall ed., ESCOM Publisher: Leiden, Netherlands, 1988), substituted gamma lactam rings (Garvey et al. in Peptides: Chemistry and Biology, G. R. Marshall ed., ESCOM Publisher: Leiden, Netherlands, 1988), keto-methylene pseudopeptides (Ewenson et al. (1986) J Med Chem 29:295; and Ewenson et al. in Peptides: Structure and Function (Proceedings of the 9th American Peptide Symposium) Pierce Chemical Co. Rockland, Ill., 1985), b-turn dipeptide cores (Nagai et al. (1985) Tetrahedron Lett 26:647; and Sato et al. (1986) J Chem Soc Perkin Trans 1:1231), and b-aminoalcohols (Gordon et al. (1985) Biochem Biophys Res Commun 126:419; and Dann et al. (1986) Biochem Biophys Res Commun 134:71).

### Delta3 Fusion Proteins and Immunogens.

[0696] In another embodiment, the coding sequences for the polypeptide can be incorporated as a part of a fusion gene including a nucleotide sequence encoding a different polypeptide.

[0697] In one embodiment, the Delta3 polypeptide is a Delta3-Ig polypeptide. The Delta3-Ig polypeptide can comprise the entire extracellular domain of Delta3, e.g., human Delta3, or a variant thereof. For example, a Delta3-Ig polypeptide can comprise an amino acid sequences from about amino acid 1 to about amino acid 529 of SEQ ID NO: 2 or from about amino acid 1 to about amino acid 530 of SEQ ID NO: 25. Other preferred Delta3-Ig proteins do not comprise a signal peptide and thus, preferably do not comprise about amino acid 1 to about amino acid 17 or amino acid 18 of SEQ ID NO: 2 or 25. Alternatively, a Delta3-Ig fusion protein can comprise a portion of the extracellular domain of a Delta3 protein or a variant of a portion of the extracellular domain of a Delta3 protein. Preferred portions of the extracellular domain include portions having at least one motif amino terminal to the transmembrane domain. For example a Delta3-Ig fusion protein can comprise at least one EGF-like domain. A Delta3-Ig fusion protein can further comprise a DSL domain. A Delta3-Ig fusion protein can also further comprise a signal peptide. Delta3-Ig fusion proteins can be prepared as described, e.g., in U.S. Pat. No. 5,434,131.

[0698] This type of expression system can be useful under conditions where it is desirable to produce an immunogenic fragment of a Delta3 protein. For example, the VP6 capsid protein of rotavirus can be used as an immunologic carrier protein for portions of the Delta3 polypeptide, either in the monomeric form or in the form of a viral particle. The nucleic acid sequences corresponding to the portion of a subject Delta3 protein to which antibodies are to be raised can be incorporated into a fusion gene construct which includes coding sequences for a late vaccinia virus structural protein to produce a set of recombinant viruses expressing fusion proteins comprising Delta3 epitopes as part of the virion. It has been demonstrated with the use of immunogenic fusion proteins utilizing the Hepatitis B surface antigen fusion proteins that recombinant Hepatitis B virions can be utilized in this role as well. Similarly, chimeric constructs coding for fusion proteins containing a portion of a Delta3 protein and the poliovirus capsid protein can be created to enhance immunogenicity of the set of polypeptide antigens (see, for example, EP Publication No: 0259149; and Evans et al. (1989) Nature 339:385; Huang et al. (1988) J. Virol. 62:3855; and Schlienger et al. (1992) J. Virol. 66:2).

[0699] The Multiple Antigen Peptide system for peptide-based immunization can also be utilized to generate an immunogen, wherein a desired portion of a Delta3 polypeptide is obtained directly from organo-chemical synthesis of the peptide onto an oligomeric branching lysine core (see, for example, Posnett et al. (1988) J. Biol. Chem. 263:1719 and Nardelli et al. (1992) J. Immunol. 148:914). Antigenic determinants of Delta3 proteins can also be expressed and presented by bacterial cells.

[0700] In addition to utilizing fusion proteins to enhance immunogenicity, it is widely appreciated that fusion proteins can also facilitate the expression of proteins, and accordingly, can be used in the expression of the Delta3 polypeptides of the present invention. For example, Delta3 polypeptides can be generated as glutathione-S-transferase (GST-fusion) proteins. Such GST-fusion proteins can enable easy purification of the Delta3 polypeptide, as for example by the use of glutathione-derivatized matrices (see, for example, Current Protocols in Molecular Biology, eds. Ausubel et al. (N.Y.: John Wiley & Sons, 1991)).

[0701] In another embodiment, a fusion gene coding for a purification leader sequence, such as a poly-(His)/enterokinase cleavage site sequence at the N-terminus of the desired portion of the recombinant protein, can allow purification of the expressed fusion protein by affinity chromatography using a Ni²⁺ metal resin. The purification leader sequence can then be subsequently removed by treatment with enterokinase to provide the purified protein (e.g., see Hochuli et al. (1987) J. Chromatography 411:177; and Janknecht et al. Proc. Natl. Acad. Sci. USA 88:8972). Techniques for making fusion genes are known to those skilled in the art. Essentially, the joining of various DNA fragments coding for different polypeptide sequences is performed in accordance with conventional techniques, employing blunt-ended or stagger-ended termini for ligation, restriction enzyme digestion to provide for appropriate termini, filling-in of cohesive ends as appropriate, alkaline phosphatase treatment to avoid undesirable joining, and enzymatic ligation. In another embodiment, the fusion gene can be synthesized by conventional techniques including automated DNA synthesizers. Alternatively, PCR amplification of gene fragments can be carried out using anchor primers which give rise to complementary overhangs between two consecutive gene fragments which can subsequently be annealed to generate a chimeric gene sequence (see, for example, Current Protocols in Molecular Biology, eds. Ausubel et al. John Wiley & Sons: 1992).

### Delta3 Antibodies

[0702] Another aspect of the invention pertains to an antibody that binds to a Delta3 protein; that is, to antibodies directed against a polypeptide of the invention. For example, by using immunogens derived from a Delta3 protein, e.g., based on the cDNA sequences, anti-protein/anti-peptide antisera or monoclonal antibodies can be made by standard protocols (See, for example, Antibodies: A Laboratory Manual ed. by Harlow and Lane (Cold Spring Harbor Press: 1988)). A mammal, such as a mouse, a hamster or rabbit can be immunized with an immunogenic form of the peptide (e.g., a Delta3 polypeptide or an antigenic fragment which is capable of eliciting an antibody response, or a fusion protein as described above). Techniques for conferring immunogenicity on a protein or peptide include conjugation to carriers or other techniques well known in the art. An immunogenic portion of a Delta3 protein can be administered in the presence of adjuvant. The progress of immunization can be monitored by detection of antibody titers in plasma or serum. Standard ELISA or other immunoassays can be used with the immunogen as antigen to assess the levels of antibodies.

[0703] Following immunization of an animal with an antigenic preparation of a Delta3 polypeptide, anti-Delta3 antisera can be obtained and, if desired, polyclonal anti-Delta3 antibodies isolated from the serum. To produce monoclonal antibodies, antibody-producing cells (lymphocytes) can be harvested from an immunized animal and fused by standard somatic cell fusion procedures with immortalizing cells such as myeloma cells to yield hybridoma cells. Such techniques are well known in the art, and include, for example, the hybridoma technique (originally developed by Kohler and Milstein, (1975) Nature, 256: 495-497), the human B cell hybridoma technique (Kozbar et al., (1983) Immunology Today, 4: 72), and the EBV-hybridoma technique to produce human monoclonal antibodies (Cole et al., (1985) Monoclonal Antibodies and Cancer Therapy, Alan R. Liss, Inc. pp. 77-96). Hybridoma cells can be screened immunochemically for production of antibodies specifically reactive with a Delta3 polypeptide of the present invention and monoclonal antibodies isolated from a culture comprising such hybridoma cells. In one embodiment anti-human Delta3 antibodies specifically react with the proteins encoded by the DNA of ATCC® Deposit Accession Number 98348.

[0704] Antibodies can be fragmented using conventional techniques and the fragments screened for utility in the same manner as described above for whole antibodies. For example, F(ab)2 fragments can be generated by treating antibody with pepsin. The resulting F(ab)2 fragment can be treated to reduce disulfide bridges to produce Fab fragments. The antibody of the present invention is further intended to include bispecific and chimeric molecules having affinity for a Delta3 protein conferred by at least one CDR region of the antibody.

[0705] Antibodies which specifically bind Delta3 epitopes can also be used in immunohistochemical staining of tissue samples in order to evaluate the abundance and pattern of expression of each of the subject Delta3 polypeptides. Anti-Delta3 antibodies can be used diagnostically in immuno-precipitation and immuno-blotting to detect and evaluate Delta3 protein levels in tissue as part of a clinical testing procedure. For instance, such measurements can be useful in predictive valuations of the onset or progression of neurodegenerative, neoplastic or hyperplastic disorders. Likewise, the ability to monitor Delta3 protein levels in an individual can allow determination of the efficacy of a given treatment regimen for an individual afflicted with such a disorder. The level of Delta3 polypeptides may be measured from cells in bodily fluid, such as in samples of cerebral spinal fluid or amniotic fluid, or can be measured in tissue, such as produced by biopsy. Diagnostic assays using anti-Delta3 antibodies can include, for example, immunoassays designed to aid in early diagnosis of a neurodegenerative disorder, particularly ones which are manifest at birth. Diagnostic assays using anti-Delta3 polypeptide antibodies can also include immunoassays designed to aid in early diagnosis and phenotyping neurodegenerative, neoplastic or hyperplastic disorders.

[0706] Another application of anti-Delta3 antibodies of the present invention is in the immunological screening of cDNA libraries constructed in expression vectors such as λgt11, λgt18-23, λZAP, and ORF8. Messenger libraries of this type, having coding sequences inserted in the correct reading frame and orientation, can produce fusion proteins. For instance, λgt11 will produce fusion proteins whose amino termini consist of β-galactosidase amino acid sequences and whose carboxy termini consist of a foreign polypeptide. Antigenic epitopes of a Delta3 protein, e.g., other orthologs of a particular Delta3 protein or other paralogs from the same species, can then be detected with antibodies, as, for example, reacting nitrocellulose filters lifted from infected plates with anti-Delta3 antibodies. Positive phage detected by this assay can then be isolated from the infected plate. Thus, the presence of Delta3 homologs can be detected and cloned from other animals, as can alternate isoforms (including splicing variants) from humans.

[0707] Polyclonal antibodies can be prepared as described above by immunizing a suitable subject with a polypeptide of the invention as an immunogen. Preferred polyclonal antibody compositions are ones that have been selected for antibodies directed against a polypeptide or polypeptides of the invention. Particularly preferred polyclonal antibody preparations are ones that contain only antibodies directed against a polypeptide or polypeptides of the invention. Particularly preferred immunogen compositions are those that contain no other human proteins such as, for example, immunogen compositions made using a non-human host cell for recombinant expression of a polypeptide of the invention. In such a manner, the only human epitope or epitopes recognized by the resulting antibody compositions raised against this immunogen will be present as part of a polypeptide or polypeptides of the invention.

[0708] The antibody titer in the immunized subject can be monitored over time by standard techniques, such as with an enzyme linked immunosorbent assay (ELISA) using immobilized polypeptide. If desired, the antibody molecules can be isolated from the mammal (e.g., from the blood) and further purified by well-known techniques, such as protein A chromatography to obtain the IgG fraction. Alternatively, antibodies specific for a protein or polypeptide of the invention can be selected for (e.g., partially purified) or purified by, e.g., affinity chromatography. For example, a recombinantly expressed and purified (or partially purified) protein of the invention is produced as described herein, and covalently or non-covalently coupled to a solid support such as, for example, a chromatography column. The column can then be used to affinity purify antibodies specific for the proteins of the invention from a sample containing antibodies directed against a large number of different epitopes, thereby generating a substantially purified antibody composition, i.e., one that is substantially free of contaminating antibodies. By a substantially purified antibody composition is meant, in this context, that the antibody sample contains at most only 30% (by dry weight) of contaminating antibodies directed against epitopes other than those on the desired protein or polypeptide of the invention, and preferably at most 20%, yet more preferably at most 10%, and most preferably at most 5% (by dry weight) of the sample is contaminating antibodies. A purified antibody composition means that at least 99% of the antibodies in the composition are directed against the desired protein or polypeptide of the invention.

[0709] At an appropriate time after immunization, e.g., when the specific antibody titers are highest, antibody-producing cells can be obtained from the subject and used to prepare monoclonal antibodies by standard techniques, such as the hybridoma technique originally described by Kohler and Milstein (1975) Nature 256:495-497, the human B cell hybridoma technique (Kozbor et al. (1983) Immunol. Today 4:72), the EBV-hybridoma technique (Cole et al. (1985), Monoclonal Antibodies and Cancer Therapy, Alan R. Liss, Inc., pp. 77-96) or trioma techniques. The technology for producing hybridomas is well known (see generally Current Protocols in Immunology (1994) Coligan et al. (eds.) John Wiley & Sons, Inc., New York, N.Y.). Hybridoma cells producing a monoclonal antibody of the invention are detected by screening the hybridoma culture supernatants for antibodies that bind the polypeptide of interest, e.g., using a standard ELISA assay.

[0710] Alternative to preparing monoclonal antibody-secreting hybridomas, a monoclonal antibody directed against a polypeptide of the invention can be identified and isolated by screening a recombinant combinatorial immunoglobulin library (e.g., an antibody phage display library) with the polypeptide of interest. Kits for generating and screening phage display libraries are commercially available (e.g., the Pharmacia Recombinant Phage Antibody System, Catalog NO: 27-9400-01; and the Stratagene SurfZAP Phage Display Kit, Catalog NO: 240612). Additionally, examples of methods and reagents particularly amenable for use in generating and screening antibody display library can be found in, for example, U.S. Pat. No. 5,223,409; PCT Publication No: WO 92/18619; PCT Publication No: WO 91/17271; PCT Publication No: WO 92/20791; PCT Publication No: WO 92/15679; PCT Publication No: WO 93/01288; PCT Publication No: WO 92/01047; PCT Publication No: WO 92/09690; PCT Publication No: WO 90/02809; Fuchs et al. (1991) Bio/Technology 9:1370-1372; Hay et al. (1992) Hum. Antibod. Hybridomas 3:81-85; Huse et al. (1989) Science 246:1275-1281; Griffiths et al. (1993) EMBO J. 12:725-734.

[0711] Additionally, recombinant antibodies, such as chimeric and humanized monoclonal antibodies, comprising both human and non-human portions, which can be made using standard recombinant DNA techniques, are within the scope of the invention. A chimeric antibody is a molecule in which different portions are derived from different animal species, such as those having a variable region derived from a murine mAb and a human immunoglobulin constant region. (See, e.g., Cabilly et al., U.S. Pat. No. 4,816,567; and Boss et al., U.S. Pat. No. 4,816,397, which are incorporated herein by reference in their entirety.) Humanized antibodies are antibody molecules from non-human species having one or more complementarily determining regions (CDRs) from the non-human species and a framework region from a human immunoglobulin molecule. (See, e.g., Queen, U.S. Pat. No. 5,585,089.) Such chimeric and humanized monoclonal antibodies can be produced by recombinant DNA techniques known in the art, for example using methods described in PCT Publication NO: WO 87/02671; European Patent Application 184,187; European Patent Application 171,496; European Patent Application 173,494; PCT Publication NO: WO 86/01533; U.S. Pat. No. 4,816,567; European Patent Application 125,023; Better et al. (1988) Science 240:1041-1043; Liu et al. (1987) Proc. Natl. Acad. Sci. USA 84:3439-3443; Liu et al. (1987) J. Immunol. 139:3521-3526; Sun et al. (1987) Proc. Natl. Acad. Sci. USA 84:214-218; Nishimura et al. (1987) Canc. Res. 47:999-1005; Wood et al. (1985) Nature 314:446-449; and Shaw et al. (1988) J. Natl. Cancer Inst. 80:1553-1559); Morrison (1985) Science 229:1202-1207; Oi et al. (1986) Bio/Techniques 4:214; U.S. Pat. No. 5,225,539; Jones et al. (1986) Nature 321:552-525; Verhoeyan et al. (1988) Science 239:1534; and Beidler et al. (1988) J. Immunol. 141:4053-4060.

[0712] Completely human antibodies are particularly desirable for therapeutic treatment of human patients. Such antibodies can be produced, for example, using transgenic mice which are incapable of expressing endogenous immunoglobulin heavy and light chains genes, but which can express human heavy and light chain genes. The transgenic mice are immunized in the normal fashion with a selected antigen, e.g., all or a portion of a polypeptide of the invention. Monoclonal antibodies directed against the antigen can be obtained using conventional hybridoma technology. The human immunoglobulin transgenes harbored by the transgenic mice rearrange during B cell differentiation, and subsequently undergo class switching and somatic mutation. Thus, using such a technique, it is possible to produce therapeutically useful IgG, IgA and IgE antibodies. For an overview of this technology for producing human antibodies, see Lonberg and Huszar (1995, Int. Rev. Immunol. 13:65-93). For a detailed discussion of this technology for producing human antibodies and human monoclonal antibodies and protocols for producing such antibodies, see, e.g., U.S. Pat. No. 5,625,126; U.S. Pat. No. 5,633,425; U.S. Pat. No. 5,569,825; U.S. Pat. No. 5,661,016; and U.S. Pat. No. 5,545,806. In addition, companies such as Abgenix, Inc. (Freemont, Calif.), can be engaged to provide human antibodies directed against a selected antigen using technology similar to that described above.

[0713] Completely human antibodies which recognize a selected epitope can be generated using a technique referred to as “guided selection.” In this approach a selected non-human monoclonal antibody, e.g., a murine antibody, is used to guide the selection of a completely human antibody recognizing the same epitope. (Jespers et al. (1994) Bio/technology 12:899-903).

[0714] An antibody directed against a polypeptide of the invention (e.g., monoclonal antibody) can be used to isolate the polypeptide by standard techniques, such as affinity chromatography or immunoprecipitation. Moreover, such an antibody can be used to detect the protein (e.g., in a cellular lysate or cell supernatant) in order to evaluate the abundance and pattern of expression of the polypeptide. The antibodies can also be used diagnostically to monitor protein levels in tissue as part of a clinical testing procedure, e.g., to, for example, determine the efficacy of a given treatment regimen. Detection can be facilitated by coupling the antibody to a detectable substance. Examples of detectable substances include various enzymes, prosthetic groups, fluorescent materials, luminescent materials, bioluminescent materials, and radioactive materials. Examples of suitable enzymes include horseradish peroxidase, alkaline phosphatase, β-galactosidase, or acetylcholinesterase; examples of suitable prosthetic group complexes include streptavidin/biotin and avidin/biotin; examples of suitable fluorescent materials include umbelliferone, fluorescein, fluorescein isothiocyanate, rhodamine, dichlorotriazinylamine fluorescein, dansyl chloride or phycoerythrin; an example of a luminescent material includes luminol; examples of bioluminescent materials include luciferase, luciferin, and aequorin, and examples of suitable radioactive material include ¹²⁵I, ¹³¹I, ³⁵S or ³H.

[0715] Further, an antibody (or fragment thereof) can be conjugated to a therapeutic moiety such as a cytotoxin, a therapeutic agent or a radioactive metal ion. A cytotoxin or cytotoxic agent includes any agent that is detrimental to cells. Examples include taxol, cytochalasin B, gramicidin D, ethidium bromide, emetine, mitomycin, etoposide, tenoposide, vincristine, vinblastine, colchicin, doxorubicin, daunorubicin, dihydroxy anthracin dione, mitoxantrone, mithramycin, actinomycin D, 1-dehydrotestosterone, glucocorticoids, procaine, tetracaine, lidocaine, propranolol, and puromycin and analogs or homologs thereof. Therapeutic agents include, but are not limited to, antimetabolites (e.g., methotrexate, 6-mercaptopurine, 6-thioguanine, cytarabine, 5-fluorouracil decarbazine), alkylating agents (e.g., mechlorethamine, thioepa chlorambucil, melphalan, carmustine (BSNU) and lomustine (CCNU), cyclothosphamide, busulfan, dibromomannitol, streptozotocin, mitomycin C, and cis-dichlorodiamine platinum (II) (DDP) cisplatin), anthracyclines (e.g., daunorubicin (formerly daunomycin) and doxorubicin), antibiotics (e.g., dactinomycin (formerly actinomycin), bleomycin, mithramycin, and anthramycin (AMC)), and anti-mitotic agents (e.g., vincristine and vinblastine).

[0716] The conjugates of the invention can be used for modifying a given biological response, the drug moiety is not to be construed as limited to classical chemical therapeutic agents. For example, the drug moiety may be a protein or polypeptide possessing a desired biological activity. Such proteins may include, for example, a toxin such as abrin, ricin A, pseudomonas exotoxin, or diphtheria toxin; a protein such as tumor necrosis factor, .alpha.-interferon, .beta.-interferon, nerve growth factor, platelet derived growth factor, tissue plasminogen activator; or, biological response modifiers such as, for example, lymphokines, interleukin-1 (“IL-1”), interleukin-2 (“IL-2”), interleukin-6 (“IL-6”), granulocyte macrophase colony stimulating factor (“GM-CSF”), granulocyte colony stimulating factor (“G-CSF”), or other growth factors.

[0717] Techniques for conjugating such therapeutic moiety to antibodies are well known, see, e.g., Amon et al., “Monoclonal Antibodies For Immunotargeting Of Drugs In Cancer Therapy”, in Monoclonal Antibodies And Cancer Therapy, Reisfeld et al. (eds.), pp. 243-56 (Alan R. Liss, Inc. 1985); Hellstrom et al., “Antibodies For Drug Delivery”, in Controlled Drug Delivery (2nd Ed.), Robinson et al. (eds.), pp. 623-53 (Marcel Dekker, Inc. 1987); Thorpe, “Antibody Carriers Of Cytotoxic Agents In Cancer Therapy: A Review”, in Monoclonal Antibodies '84: Biological And Clinical Applications, Pinchera et al. (eds.), pp. 475-506 (1985); “Analysis, Results, And Future Prospective Of The Therapeutic Use Of Radiolabeled Antibody In Cancer Therapy”, in Monoclonal Antibodies For Cancer Detection And Therapy, Baldwin et al. (eds.), pp. 303-16 (Academic Press 1985), and Thorpe et al., “The Preparation And Cytotoxic Properties Of Antibody-Toxin Conjugates”, Immunol. Rev., 62:119-58 (1982).

[0718] Alternatively, an antibody can be conjugated to a second antibody to form an antibody heteroconjugate as described by Segal in U.S. Pat. No. 4,676,980, incorporated herein by reference in its entirety.

[0719] Accordingly, in one aspect, the invention provides substantially purified antibodies or fragment thereof, and human and non-human antibodies or fragments thereof, which antibodies or fragments specifically bind to a polypeptide comprising an amino acid sequence selected from the group consisting of: the amino acid sequence of any one of SEQ ID NOs: 2, 25, 28, 30, 32, 34, 36, 38, 40, 42, 44 or 46, or an amino acid sequence encoded by the cDNA of a clone deposited as ATCC® 98348; a fragment of at least 15 amino acid residues of the amino acid sequence of any one of SEQ ID NOs: 2, 25, 28, 30, 32, 34, 36, 38, 40, 42, 44 or 46, an amino acid sequence which is at least 95% identical to the amino acid sequence of any one of SEQ ID NOs: 2, 25, 28, 30, 32, 34, 36, 38, 40, 42, 44 or 46, wherein the percent identity is determined using the ALIGN program of the GCG software package with a PAM120 weight residue table, a gap length penalty of 12, and a gap penalty of 4; and an amino acid sequence which is encoded by a nucleic acid molecule which hybridizes to the nucleic acid molecule consisting of any one of SEQ ID Nos:1, 3, 24, 26, 27, 29, 31, 33, 35, 37, 39, 41, 43 or 45, or the cDNA of a clone deposited as ATCC® 98348, or a complement thereof, under conditions of hybridization of 6×SSC at 45□C. and washing in 0.2×SSC, 0.1% SDS at 65□C. In various embodiments, the substantially purified antibodies of the invention, or fragments thereof, can be human, non-human, chimeric and/or humanized antibodies.

[0720] In another aspect, the invention provides human and non-human antibodies or fragments thereof, which antibodies or fragments specifically bind to a polypeptide comprising an amino acid sequence selected from the group consisting of: the amino acid sequence of any one of SEQ ID NOs: 2, 25, 28, 30, 32, 34, 36, 38, 40, 42, 44 or 46, or an amino acid sequence encoded by the cDNA of a clone deposited as ATCC® 98348; a fragment of at least 15 amino acid residues of the amino acid sequence of any one of SEQ ID NOs: 2, 25, 28, 30, 32, 34, 36, 38, 40, 42, 44 or 46, an amino acid sequence which is at least 95% identical to the amino acid sequence of any one of SEQ ID NOs: 2, 25, 28, 30, 32, 34, 36, 38, 40, 42, 44 or 46, wherein the percent identity is determined using the ALIGN program of the GCG software package with a PAM120 weight residue table, a gap length penalty of 12, and a gap penalty of 4; and an amino acid sequence which is encoded by a nucleic acid molecule which hybridizes to the nucleic acid molecule consisting of any one of SEQ ID Nos:1, 3, 24, 26, 27, 29, 31, 33, 35, 37, 39, 41, 43 or 45, or the cDNA of a clone deposited as ATCC® 98348, or a complement thereof, under conditions of hybridization of 6×SSC at 45□C. and washing in 0.2×SSC, 0.1% SDS at 65□C. Such non-human antibodies can be goat, mouse, sheep, horse, chicken, rabbit, or rat antibodies. Alternatively, the non-human antibodies of the invention can be chimeric and/or humanized antibodies. In addition, the non-human antibodies of the invention can be polyclonal antibodies or monoclonal antibodies.

[0721] In still a further aspect, the invention provides monoclonal antibodies or fragments thereof, which antibodies or fragments specifically bind to a polypeptide comprising an amino acid sequence selected from the group consisting of: the amino acid sequence of any one of SEQ ID NOs: 2, 25, 28, 30, 32, 34, 36, 38, 40, 42, 44 or 46, or an amino acid sequence encoded by the cDNA of a clone deposited as ATCC® 98348; a fragment of at least 15 amino acid residues of the amino acid sequence of any one of SEQ ID NOs: 2, 25, 28, 30, 32, 34, 36, 38, 40, 42, 44 or 46, an amino acid sequence which is at least 95% identical to the amino acid sequence of any one of SEQ ID NOs: 2, 25, 28, 30, 32, 34, 36, 38, 40, 42, 44 or 46, wherein the percent identity is determined using the ALIGN program of the GCG software package with a PAM120 weight residue table, a gap length penalty of 12, and a gap penalty of 4; and an amino acid sequence which is encoded by a nucleic acid molecule which hybridizes to the nucleic acid molecule consisting of any one of SEQ ID NOs: 1, 3, 24, 26, 27, 29, 31, 33, 35, 37, 39, 41, 43 or 45, or the cDNA of a clone deposited as any of ATCC® 98348, or a complement thereof, under conditions of hybridization of 6×SSC at 45□C. and washing in 0.2×SSC, 0.1% SDS at 65□C. The monoclonal antibodies can be human, humanized, chimeric and/or non-human antibodies.

[0722] The substantially purified antibodies or fragments thereof specifically bind to a signal peptide, a secreted sequence, an extracellular domain, a transmembrane or a cytoplasmic domain cytoplasmic membrane of a polypeptide of the invention. In a particularly preferred embodiment, the substantially purified antibodies or fragments thereof, the human and non-human antibodies or fragments thereof, and/or the monoclonal antibodies or fragments thereof, of the invention specifically bind to a secreted sequence or an extracellular domain of the amino acid sequence of SEQ ID NOs: 2, 25, 28, 30, 32, 34, 36, 38, 40, 42, 44 or 46. Preferably, the secreted sequence or extracellular domain to which the antibody, or fragment thereof, binds comprises from about amino acids 1-529 or 18-529 of SEQ ID NO: 2, or from amino acids 1-530 or 18-530 of SEQ ID NO: 25.

[0723] Any of the antibodies of the invention can be conjugated to a therapeutic moiety or to a detectable substance. Non-limiting examples of detectable substances that can be conjugated to the antibodies of the invention are an enzyme, a prosthetic group, a fluorescent material, a luminescent material, a bioluminescent material, and a radioactive material.

[0724] The invention also provides a kit containing an antibody of the invention, and instructions for use. In another embodiment, a kit comprising an antibody of the invention conjugated to a detectable substance and instructions for use. Still another aspect of the invention is a pharmaceutical composition comprising an antibody of the invention and a pharmaceutically acceptable carrier. In preferred embodiments, the pharmaceutical composition contains an antibody of the invention, a therapeutic moiety, and a pharmaceutically acceptable carrier.

[0725] Still another aspect of the invention is a method of making an antibody that binds, that is, is directed against, Delta3, the method comprising immunizing a mammal with a polypeptide. The polypeptide used as an immungen comprises an amino acid sequence selected from the group consisting of: the amino acid sequence of any one of SEQ ID NOs: 2, 25, 28, 30, 32, 34, 36, 38, 40, 42, 44 or 46, or an amino acid sequence encoded by the cDNA of a clone deposited as ATCC® 98348; a fragment of at least 15 amino acid residues of the amino acid sequence of any one of SEQ ID NOs: 2, 25, 28, 30, 32, 34, 36, 38, 40, 42, 44 or 46, an amino acid sequence which is at least 95% identical to the amino acid sequence of any one of SEQ ID NOs: 2, 25, 28, 30, 32, 34, 36, 38, 40, 42, 44 or 46, wherein the percent identity is determined using the ALIGN program of the GCG software package with a PAM120 weight residue table, a gap length penalty of 12, and a gap penalty of 4; and an amino acid sequence which is encoded by a nucleic acid molecule which hybridizes to the nucleic acid molecule consisting of any one of SEQ ID NOs:1, 3, 24, 26, 27, 29, 31, 33, 35, 37, 39, 41, 43 or 45, or the cDNA of a clone deposited as ATCC® 98348, or a complement thereof, under conditions of hybridization of 6×SSC at 45□C. and washing in 0.2×SSC, 0.1% SDS at 65□C. After immunization, a sample is collected from the mammal that contains an antibody that specifically recognizes Delta3. Preferably, the polypeptide is recombinantly produced using a non-human host cell. Optionally, the antibodies can be further purified from the sample using techniques well known to those of skill in the art. The method can further comprise producing a monoclonal antibody-producing cell from the cells of the mammal. Optionally, antibodies are collected from the antibody-producing cell.

### Isolated FTHMA-070, Tango85, Tango77, SPOIL, NEOKINE, Tango129 or A259 Proteins and Anti-FTHMA-070 or Anti-T85 Antibodies

[0726] One aspect of the invention pertains to isolated FTHMA-070, Tango85, Tango77, SPOIL, NEOKINE, Tango129 or A259 proteins, and biologically active portions thereof, as well as polypeptide fragments suitable for use as immunogens to raise anti-FTHMA-070, Tango85, Tango77, SPOIL, NEOKINE, Tango129 or A259 antibodies. In one embodiment, native FTHMA-070, Tango85, Tango77, SPOIL, NEOKINE, Tango129 or A259 proteins can be isolated from cells or tissue sources by an appropriate purification scheme using standard protein purification techniques. In another embodiment, FTHMA-070, Tango85, Tango77, SPOIL, NEOKINE, Tango129 or A259 proteins are produced by recombinant DNA techniques. Alternative to recombinant expression, a FTHMA-070, Tango85, Tango77, SPOIL, NEOKINE, Tango129 or A259 protein or polypeptide can be synthesized chemically using standard peptide synthesis techniques.

[0727] An “isolated” or “purified” protein or biologically active portion thereof is substantially free of cellular material or other contaminating proteins from the cell or tissue source from which the FTHMA-070, Tango85, Tango77, SPOIL, NEOKINE, Tango129 or A259 protein is derived, or substantially free from chemical precursors or other chemicals when chemically synthesized. The language “substantially free of cellular material” includes preparations of FTHMA-070, Tango85, Tango77, SPOIL, NEOKINE, Tango129 or A259 protein in which the protein is separated from cellular components of the cells from which it is isolated or recombinantly produced. Thus, FTHMA-070, Tango85, Tango77, SPOIL, NEOKINE, Tango129 or A259 protein that is substantially free of cellular material includes preparations of FTHMA-070, Tango85, Tango77, SPOIL, NEOKINE, Tango129 or A259 protein having less than about 30%, 20%, 10%, or 5% (by dry weight) of non-FTHMA-070, Tango85, Tango77, SPOIL, NEOKINE, Tango129 or A259 protein (also referred to herein as a “contaminating protein”). When the FTHMA-070, Tango85, Tango77, SPOIL, NEOKINE, Tango129 or A259 protein or biologically active portion thereof is recombinantly produced, it is also preferably substantially free of culture medium, i.e., culture medium represents less than about 20%, 10%, or 5% of the volume of the protein preparation. When FTHMA-070, Tango85, Tango77, SPOIL, NEOKINE, Tango129 or A259 protein is produced by chemical synthesis, it is preferably substantially free of chemical precursors or other chemicals, i.e., it is separated from chemical precursors or other chemicals which are involved in the synthesis of the protein. Accordingly such preparations of FTHMA-070, Tango85, Tango77, SPOIL, NEOKINE, Tango129 or A259 protein have less than about 30%, 20%, 10%, 5% (by dry weight) of chemical precursors or non-FTHMA-070, Tango85, Tango77, SPOIL, NEOKINE, Tango129 or A259 chemicals.

[0728] Biologically active portions of a FTHMA-070, Tango85, Tango77, SPOIL, NEOKINE, Tango129 or A259 protein include peptides comprising amino acid sequences sufficiently identical to or derived from the amino acid sequence of the FTHMA-070, Tango85, Tango77, SPOIL, NEOKINE, Tango129 or A259 protein, which include less amino acids than the full length FTHMA-070, Tango85, Tango77, SPOIL, NEOKINE, Tango129 or A259 proteins, and exhibit at least one activity of a FTHMA-070, Tango85, Tango77, SPOIL, NEOKINE, Tango129 or A259 protein. Typically, biologically active portions comprise a domain or motif with at least one activity of the FTHMA-070, Tango85, Tango77, SPOIL, NEOKINE, Tango129 or A259 protein. A biologically active portion of a FTHMA-070, Tango85, Tango77, SPOIL, NEOKINE, Tango129 or A259 protein can be a polypeptide which is, for example, 10, 25, 50, 100 or more amino acids in length. Preferred biologically active polypeptides include one or more identified structural domains. Preferred biologically active polypeptides include one or more identified T129 structural domains, e.g., TNFR/NGFR cysteine-rich domain (SEQ ID NO:142).

[0729] Moreover, other biologically active portions, in which other regions of the protein are deleted, can be prepared by recombinant techniques and evaluated for one or more of the functional activities of a native FTHMA-070 or T85 protein. Preferred FTHMA-070 or T85 protein has the amino acid sequence shown of SEQ ID NO:54 or SEQ ID NO:58, respectively. Other useful FTHMA-070 or T85 proteins are substantially identical to SEQ ID NO:54 or SEQ ID NO:58, respectively and retain the functional activity of the reference protein yet differ in amino acid sequence due to natural allelic variation or mutagenesis.

[0730] Accordingly, a useful FTHMA-070 protein is a protein which includes an amino acid sequence at least about 45%, preferably 55%, 65%, 75%, 85%, 95%, or 99% identical to the amino acid sequence of SEQ ID NO:54 and retains the functional activity of the FTHMA-070 protein of SEQ ID NO:54. In a preferred embodiment, the FTHMA-070 protein retains the functional activity of the FTHMA-070 protein of SEQ ID NO:54.

[0731] Accordingly, a useful T85 protein is a protein which includes an amino acid sequence at least about 45%, preferably 55%, 65%, 75%, 85%, 95%, or 99% identical to the amino acid sequence of SEQ ID NO:58 and retains the functional activity of the T85 protein of SEQ ID NO:58. In other instances, the T85 protein is a protein having an amino acid sequence 55%, 65%, 75%, 85%, 95%, or 98% identical to one of the T85 fibronectin type III or Ig superfamily domains (SEQ ID NOs:61-67). In a preferred embodiment, the T85 protein retains the functional activity of the T85 protein of SEQ ID NO:58.

[0732] Preferred Tango-77 protein has the amino acid sequence shown of SEQ ID NO:72, SEQ ID NO:75, SEQ ID NO:77, SEQ ID NO:79, SEQ ID NO:81, or SEQ ID NO:83. Other useful Tango-77 proteins are substantially identical to SEQ ID NO:72, SEQ ID NO:75, SEQ ID NO:77, SEQ ID NO:79, SEQ ID NO:81, or SEQ ID NO:83 and retain the functional activity of the protein of SEQ ID NO:72, SEQ ID NO:75, SEQ ID NO:77, SEQ ID NO:79, SEQ ID NO:81, or SEQ ID NO:83 yet differ in amino acid sequence due to natural allelic variation or mutagenesis. Accordingly, a useful Tango-77 protein is a protein which includes an amino acid sequence at least about 45%, preferably 55%, 65%, 75%, 85%, 95%, or 99% identical to the amino acid sequence of SEQ ID NO:72, SEQ ID NO:75, SEQ ID NO:77, SEQ ID NO:79, SEQ ID NO:81, or SEQ ID NO:83 and retains the functional activity of the Tango-77 proteins of SEQ ID NO:72, SEQ ID NO:75, SEQ ID NO:77, SEQ ID NO:79, SEQ ID NO:81, or SEQ ID NO:83. In a preferred embodiment, the Tango-77 protein retains a functional activity of the Tango-77 protein of SEQ ID NO:72, SEQ ID NO:75, SEQ ID NO:77, SEQ ID NO:79, SEQ ID NO:81, or SEQ ID NO:83.

[0733] In one embodiment, a biologically active portion of a SPOIL protein comprises at least an IL-1 signature domain. In another embodiment, a biologically active portion of a SPOIL protein comprises a SPOIL signature motif. In yet another embodiment, a biologically active portion of a SPOIL protein comprises a SPOIL unique domain. In yet another embodiment, a biologically active portion of a SPOIL protein comprises a SPOIL C-terminal unique domain. In another embodiment, a biologically active portion of a SPOIL protein comprises a signal sequence and/or is secreted. In another embodiment, a biologically active portion of a SPOIL protein lacks a signal sequence and/or is intracellular.

[0734] It is to be understood that a preferred biologically active portion of a SPOIL protein of the present invention may contain at least one of the above-identified structural domains. Another preferred biologically active portion of a SPOIL protein may contain at least two of the above-identified structural domains. Another preferred biologically active portion of a SPOIL protein may contain at least three or more of the above-identified structural domains.

[0735] Moreover, other biologically active portions, in which other regions of the protein are deleted, can be prepared by recombinant techniques and evaluated for one or more of the functional activities of a native SPOIL protein.

[0736] In a preferred embodiment, the SPOIL protein has an amino acid sequence shown in SEQ ID NO:90, SEQ ID NO:102, SEQ ID NO:105, SEQ ID NO:113, the amino acid sequence encoded by the DNA insert of the plasmid deposited with ATCC as Accession Number 98883, or the amino acid sequence encoded by the DNA insert of the plasmid deposited with ATCC as Accession Number 98984. In other embodiments, the SPOIL protein is substantially homologous to SEQ ID NO:90, SEQ ID NO:102, SEQ ID NO:105, SEQ ID NO:113, the amino acid sequence encoded by the DNA insert of the plasmid deposited with ATCC as Accession Number 98883, or the amino acid sequence encoded by the DNA insert of the plasmid deposited with ATCC as Accession Number 98984, and retains the functional activity of the protein of SEQ ID NO:90, SEQ ID NO:102, SEQ ID NO:105, SEQ ID NO:113, the amino acid sequence encoded by the DNA insert of the plasmid deposited with ATCC as Accession Number 98883, or the amino acid sequence encoded by the DNA insert of the plasmid deposited with ATCC as Accession Number 98984, yet differs in amino acid sequence due to natural allelic variation or mutagenesis, as described in detail in subsection I above. Accordingly, in another embodiment, the SPOIL protein is a protein which comprises an amino acid sequence at least about 60-65% identical to the amino acid sequence of SEQ ID NO:90, SEQ ID NO:102, SEQ ID NO:105, SEQ ID NO:113, the amino acid sequence encoded by the DNA insert of the plasmid deposited with ATCC as Accession Number 98883, or the amino acid sequence encoded by the DNA insert of the plasmid deposited with ATCC as Accession Number 98984, and, preferably, retains a functional activity of the SPOIL proteins of SEQ ID NO:90, SEQ ID NO:102, SEQ ID NO:105, SEQ ID NO:113, the amino acid sequence encoded by the DNA insert of the plasmid deposited with ATCC as Accession Number 98883, or the amino acid sequence encoded by the DNA insert of the plasmid deposited with ATCC as Accession Number 98984. Preferably, the protein is at least about 70-75% identical to SEQ ID NO:90, SEQ ID NO:102, SEQ ID NO:105, SEQ ID NO:113, the amino acid sequence encoded by the DNA insert of the plasmid deposited with ATCC as Accession Number 98883, or the amino acid sequence encoded by the DNA insert of the plasmid deposited with ATCC as Accession Number 98984, more preferably at least about 80-85% identical to SEQ ID NO:90, SEQ ID NO:102, SEQ ID NO:105, SEQ ID NO:113, the amino acid sequence encoded by the DNA insert of the plasmid deposited with ATCC as Accession Number 98883, or the amino acid sequence encoded by the DNA insert of the plasmid deposited with ATCC as Accession Number 98984, even more preferably at least about 90-95% identical to SEQ ID NO:90, SEQ ID NO:102, SEQ ID NO:105, SEQ ID NO:113, the amino acid sequence encoded by the DNA insert of the plasmid deposited with ATCC as Accession Number 98883, or the amino acid sequence encoded by the DNA insert of the plasmid deposited with ATCC as Accession Number 98984, and most preferably at least about 95% or more identical to SEQ ID NO:90, SEQ ID NO:102, SEQ ID NO:105, SEQ ID NO:113, the amino acid sequence encoded by the DNA insert of the plasmid deposited with ATCC as Accession Number 98883, or the amino acid sequence encoded by the DNA insert of the plasmid deposited with ATCC as Accession Number 98984.

[0737] In one embodiment, a biologically active portion of a NEOKINE protein comprises at least a NEOKINE CXC signature motif. In another embodiment, a biologically active portion of a NEOKINE protein comprises at least a signal sequence. In another embodiment, a biologically active portion of a NEOKINE protein comprises a NEOKINE amino acid sequence lacking a signal sequence (e.g., a mature NEOKINE protein).

[0738] It is to be understood that a preferred biologically active portion of a NEOKINE protein of the present invention may contain at least one of the above-identified structural domains. A more preferred biologically active portion of a NEOKINE protein may contain at least two of the above-identified structural domains. Moreover, other biologically active portions, in which other regions of the protein are deleted, can be prepared by recombinant techniques and evaluated for one or more of the functional activities of a native NEOKINE protein.

[0739] In a preferred embodiment, the NEOKINE protein has an amino acid sequence shown in SEQ ID NO:116, SEQ ID NO:119, SEQ ID NO:122, or SEQ ID NO:125. In other embodiments, the NEOKINE protein is substantially homologous to SEQ ID NO:116, SEQ ID NO:119, SEQ ID NO:122, or SEQ ID NO:125, and retains the functional activity of the protein of SEQ ID NO:116, SEQ ID NO:119, SEQ ID NO:122, or SEQ ID NO:125, yet differs in amino acid sequence due to natural allelic variation or mutagenesis, as described in detail in subsection I above. Accordingly, in another embodiment, the NEOKINE protein is a protein which comprises an amino acid sequence at least about 60% homologous to the amino acid sequence of SEQ ID NO:116, SEQ ID NO:119, SEQ ID NO:122, or SEQ ID NO:125 and retains the functional activity of the NEOKINE proteins of SEQ ID NO:116, SEQ ID NO:119, SEQ ID NO:122, or SEQ ID NO:125, respectively. Preferably, the protein is at least about 70% homologous to SEQ ID NO:116, SEQ ID NO:119, SEQ ID NO:122, or SEQ ID NO:125, more preferably at least about 80% homologous to SEQ ID NO:116, SEQ ID NO:119, SEQ ID NO:122, or SEQ ID NO:125, even more preferably at least about 90% homologous to SEQ ID NO:116, SEQ ID NO:119, SEQ ID NO:122, or SEQ ID NO:125, and most preferably at least about 95% or more homologous to SEQ ID NO:116, SEQ ID NO:119, SEQ ID NO:122, or SEQ ID NO:125.

[0740] Preferred T129 protein has the amino acid sequence shown of SEQ ID NO:138. Other useful T129 proteins are substantially identical to SEQ ID NO:138 and retain the functional activity of the protein of SEQ ID NO:138 yet differ in amino acid sequence due to natural allelic variation or mutagenesis. Accordingly, a useful T129 protein is a protein which includes an amino acid sequence at least about 45%, preferably 55%, 65%, 75%, 85%, 95%, or 99% identical to the amino acid sequence of SEQ ID NO:138 and retains the functional activity of the T129 proteins of SEQ ID NO:138. In other instances, the T129 protein is a protein having an amino acid sequence 55%, 65%, 75%, 85%, 95%, or 98% identical to the T129 TNFR/NGFR cysteine rich domain (SEQ ID NO:141). In a preferred embodiment, the T129 protein retains the functional activity of the T129 protein of SEQ ID NO:138.

[0741] Preferred polypeptides have the amino acid sequence of SEQ ID NO:147, 148, 165, or 166. Other useful proteins are substantially identical (e.g., at least about 45%, preferably 55%, 65%, 75%, 85%, 95%, or 99%) to any of SEQ ID NO:147, 148, 165, or 166, and retain the functional activity of the protein of the corresponding naturally-occurring protein yet differ in amino acid sequence due to natural allelic variation or mutagenesis.

[0742] To determine the percent identity of two amino acid sequences or of two nucleic acids, the sequences are aligned for optimal comparison purposes (e.g., gaps can be introduced in the sequence of a first amino acid or nucleic acid sequence for optimal alignment with a second amino or nucleic acid sequence). The amino acid residues or nucleotides at corresponding amino acid positions or nucleotide positions are then compared.

[0743] To determine the percent identity of two amino acid sequences or of two nucleic acids, the sequences are aligned for optimal comparison purposes (e.g., gaps can be introduced in the sequence of a first amino acid or nucleic acid sequence for optimal alignment with a second amino or nucleic acid sequence and non-homologous sequences can be disregarded for comparison purposes). In one embodiment, an alignment is a global alignment, e.g., an overall sequence alignment. In another embodiment, an alignment is a local alignment. In a preferred embodiment, the length of a sequence aligned for comparison purposes is at least 30%, preferably at least 40%, more preferably at least 50%, even more preferably at least 60%, and even more preferably at least 70%, 80%, or 90% of the length of the reference sequence to which it is aligned (e.g., when aligning a second sequence to the SPOIL amino acid sequence of SEQ ID NO:90, at least 29, preferably at least 39, more preferably at least 49, even more preferably at least 59, and even more preferably at least 69, 78 or 88 amino acid residues are aligned). In a particularly preferred embodiment, percent identity is calculated over the entire length of a reference sequence. The amino acid residues or nucleotides at corresponding amino acid positions or nucleotide positions are then compared.

[0744] To determine the percent homology of two amino acid sequences or of two nucleic acids, the sequences are aligned for optimal comparison purposes (e.g., gaps can be introduced in the sequence of a first amino acid or nucleic acid sequence for optimal alignment with a second amino or nucleic acid sequence and non-homologous sequences can be disregarded for comparison purposes). In a preferred embodiment, the length of a reference sequence aligned for comparison purposes is at least 30%, preferably at least 40%, more preferably at least 50%, even more preferably at least 60%, and even more preferably at least 70%, 80%, or 90% of the length of the reference sequence (e.g., when aligning a second sequence to the NEOKINE amino acid sequence of SEQ ID NO:2 having 99 amino acid residues, at least 30, preferably at least 40, more preferably at least 50, even more preferably at least 59, and even more preferably at least 69, 79, or 89 are aligned). The amino acid residues or nucleotides at corresponding amino acid positions or nucleotide positions are then compared.

[0745] When a position in the first sequence is occupied by the same amino acid residue or nucleotide as the corresponding position in the second sequence, then the molecules are homologous at that position (i.e., as used herein amino acid or nucleic acid “homology” is equivalent to amino acid or nucleic acid “identity”). The percent homology between the two sequences is a function of the number of identical positions shared by the sequences (i.e., % homology=# of identical positions/total # of positions×100).

[0746] The determination of percent homology between two sequences can be accomplished using a mathematical algorithm. A preferred, non-limiting example of a mathematical algorithm utilized for the comparison of two sequences is the algorithm of Karlin and Altschul (1990) Proc. Nat'l Acad. Sci. USA 87:2264-2268, modified as in Karlin and Altschul (1993) Proc. Nat'l Acad. Sci. USA 90:5873-5877. Such an algorithm is incorporated into the NBLAST and XBLAST programs of Altschul, et al. (1990) J. Mol. Biol. 215:403-410. BLAST nucleotide searches can be performed with the NBLAST program, score=100, wordlength=12 to obtain nucleotide sequences homologous to FTHMA-070, Tango85, Tango77, SPOIL, NEOKINE, Tango129 or A259 nucleic acid molecules of the invention. BLAST protein searches can be performed with the XBLAST program, score=50, wordlength=3 to obtain amino acid sequences homologous to FTHMA-070, Tango85, Tango77, SPOIL, NEOKINE, Tango129 or A259 protein molecules of the invention. To obtain gapped alignments for comparison purposes, Gapped BLAST can be utilized as described in Altschul et al., (1997) Nucleic Acids Res. 25:3389-3402. When utilizing BLAST and Gapped BLAST programs, the default parameters of the respective programs (e.g., XBLAST and NBLAST) can be used. Another preferred, non-limiting example of a mathematical algorithm utilized for the comparison of sequences is the algorithm of Myers and Miller, CABIOS (1989). Such an algorithm is incorporated into the ALIGN program (version 2.0) which is part of the GCG sequence alignment software package. When utilizing the ALIGN program for comparing amino acid sequences, a PAM120 weight residue table, a gap length penalty of 12, and a gap penalty of 4 can be used.

[0747] The nucleic acid and protein sequences of the present invention can further be used as a “query sequence” to perform a search against public databases to, for example, identify other family members or related sequences. Such searches can be performed using the NBLAST and XBLAST programs (version 2.0) of Altschul, et al. (1990) J. Mol. Biol. 215:403-10. BLAST nucleotide searches can be performed with the NBLAST program, score=100, wordlength=12 to obtain nucleotide sequences homologous to nucleic acid molecules of the invention. BLAST protein searches can be performed with the XBLAST program, score=50, wordlength=3 to obtain amino acid sequences homologous to protein molecules of the invention. To obtain gapped alignments for comparison purposes, Gapped BLAST can be utilized as described in Altschul et al., (1997) Nucleic Acids Res. 25(17):3389-3402. When utilizing BLAST and Gapped BLAST programs, the default parameters of the respective programs (e.g., XBLAST and NBLAST) can be used.

[0748] Another preferred, non-limiting example of a mathematical algorithm utilized for the comparison of sequences is the algorithm of Myers and Miller, CABIOS (1989). Such an algorithm is incorporated into the ALIGN program (version 2.0) which is part of the CGC sequence alignment software package. When utilizing the ALIGN program for comparing amino acid sequences, a PAM120 weight residue table, a gap length penalty of 12, and a gap penalty of 4 can be used. Additional algorithms for sequence analysis are known in the art and include ADVANCE and ADAM as described in Torellis and Robotti (1994) Comput. Appl. Biosci., 10:3-5; and FASTA described in Pearson and Lipman (1988) Proc. Natl. Acad. Sci. 85:2444-8. Within FASTA, ktup is a control option that sets the sensitivity and speed of the search. If ktup=2, similar regions in the two sequences being compared are found by looking at pairs of aligned residues; if ktup=1, single aligned amino acids are examined. ktup can be set to 2 or 1 for protein sequences, or from 1 to 6 for DNA sequences. The default if ktup is not specified is 2 for proteins and 6 for DNA.

[0749] The percent identity between two sequences can be determined using techniques similar to those described above, with or without allowing gaps. In calculating percent identity, only exact matches are counted.

[0750] The invention also provides FTHMA-070, Tango85, Tango77, SPOIL, NEOKINE, Tango129 or A259 chimeric or fusion proteins. As used herein, a FTHMA-070, Tango85, Tango77, SPOIL, NEOKINE, Tango129 or A259 “chimeric protein” or “fusion protein” comprises a FTHMA-070, Tango85, Tango77, SPOIL, NEOKINE, Tango129 or A259 polypeptide operatively linked to a non-FTHMA-070, Tango85, Tango77, SPOIL, NEOKINE, Tango129 or A259 polypeptide. A FTHMA-070, Tango85, Tango77, SPOIL, NEOKINE, Tango129 or A259 polypeptide refers to a polypeptide having an amino acid sequence corresponding to FTHMA-070, Tango85, Tango77, SPOIL, NEOKINE, Tango129 or A259, whereas a non-FTHMA-070, Tango85, Tango77, SPOIL, NEOKINE, Tango129 or A259 polypeptide refers to a polypeptide having an amino acid sequence corresponding to a protein which is not substantially identical to the FTHMA-070, Tango85, Tango77, SPOIL, NEOKINE, Tango129 or A259 protein, e.g., a protein which is different from the FTHMA-070, Tango85, Tango77, SPOIL, NEOKINE, Tango129 or A259 protein and which is derived from the same or a different organism. Within a FTHMA-070, Tango85, Tango77, SPOIL, NEOKINE, Tango129 or A259 fusion protein the FTHMA-070 or T85 polypeptide can correspond to all or a portion of a FTHMA-070, Tango85, Tango77, SPOIL, NEOKINE, Tango129 or A259 protein, preferably at least one biologically active portion of a FTHMA-070, Tango85, Tango77, SPOIL, NEOKINE, Tango129 or A259 protein. Within the fusion protein, the term “operatively linked” is intended to indicate that the FTHMA-070, Tango85, Tango77, SPOIL, NEOKINE, Tango129 or A259 polypeptide and the non-FTHMA-070 or T85 polypeptide are fused in-frame to each other. The non-FTHMA-070, Tango85, Tango77, SPOIL, NEOKINE, Tango129 or A259 polypeptide can be fused to the N-terminus or C-terminus of the FTHMA-070, Tango85, Tango77, SPOIL, NEOKINE, Tango129 or A259 polypeptide.

[0751] One useful fusion protein is a GST-FTHMA-070, Tango85, Tango77, SPOIL, NEOKINE, Tango129 or A259 fusion protein in which the FTHMA-070, Tango85, Tango77, SPOIL, NEOKINE, Tango129 or A259 sequences are fused to the C-terminus of the GST sequences. Such fusion proteins can facilitate the purification of recombinant FTHMA-070, Tango85, Tango77, SPOIL, NEOKINE, Tango129 or A259.

[0752] In another embodiment, the fusion protein is a FTHMA-070, Tango85, SPOIL, or NEOKINE protein containing a heterologous signal sequence at its N-terminus. For example, the native FTHMA-070, Tango85, SPOIL, or NEOKINE signal sequence can be removed and replaced with a signal sequence from another protein. In certain host cells (e.g., mammalian host cells), expression and/or secretion of FTHMA-070, Tango85, SPOIL, or NEOKINE can be increased through use of a heterologous signal sequence.

[0753] In another embodiment, the fusion protein is a Tango-77, Tango129 or A259 protein containing a heterologous signal sequence at its N-terminus. For example, the native Tango-77, Tango129 or A259 signal sequence (i.e., about amino acids 1 to 63 of SEQ ID NO:72; SEQ ID NO:74; or about amino acids 1 to 52 of SEQ ID NO:77; SEQ ID NO:78; or about amino acids 1 to 21 of SEQ ID NO:81; SEQ ID NO:82) can be removed and replaced with a signal sequence from another protein. For example, the native T129 signal sequence (i.e., about amino acids 1 to 22 of SEQ ID NO:138) can be removed and replaced with a signal sequence from another protein. In certain host cells (e.g., mammalian host cells), expression and/or secretion of Tango-77 can be increased through use of a heterologous signal sequence. For example, the gp67 secretory sequence of the baculovirus envelope protein can be used as a heterologous signal sequence (Ausubel et al., supra). Other examples of eukaryotic heterologous signal sequences include the secretory sequences of melittin and human placental alkaline phosphatase (Stratagene; La Jolla, Calif.). In yet another example, useful prokaryotic heterologous signal sequences include the phoA secretory signal (Sambrook et al., supra) and the protein A secretory signal (Pharmacia Biotech; Piscataway, N.J.).

[0754] In yet another embodiment, the fusion protein is an FTHMA-070, Tango85, Tango77, Tango129 or A259-immunoglobulin fusion protein in which all or part of FTHMA-070 or T85 is fused to sequences derived from a member of the immunoglobulin protein family. The FTHMA-070, Tango85, Tango77, Tango129 or A259-immunoglobulin fusion proteins of the invention can be incorporated into pharmaceutical compositions and administered to a subject to inhibit an interaction between a FTHMA-070, Tango85, Tango77, Tango129 or A259 ligand and a FTHMA-070, Tango85, Tango77, Tango129 or A259 protein. The FTHMA-070, Tango85, Tango77, Tango129 or A259-immunoglobulin fusion proteins can be used to affect the bioavailability of a FTHMA-070, Tango85, Tango77, Tango129 or A259 cognate ligand. Inhibition of the FTHMA-070, Tango85, Tango77, Tango129 or A259 ligand/FTHMA-070, Tango85, Tango77, Tango129 or A259 interaction may be useful therapeutically. Moreover, the FTHMA-070, Tango85, Tango77, Tango129 or A259-immunoglobulin fusion proteins of the invention can be used as immunogens to produce anti-FTHMA-070, Tango85, Tango77, Tango129 or A259 antibodies in a subject, to purify FTHMA-070, Tango85, Tango77, Tango129 or A259 ligands and in screening assays to identify molecules which inhibit the interaction of FTHMA-070, Tango85, Tango77, Tango129 or A259 with a FTHMA-070, Tango85, Tango77, Tango129 or A259 ligand.

[0755] In yet another embodiment, the fusion protein is a SPOIL or NEOKINE-immunoglobulin fusion protein in which the SPOIL or NEOKINE sequence are fused to sequences derived from a member of the immunoglobulin protein family. Soluble derivatives have also been made of cell surface glycoproteins in the immunoglobulin gene superfamily consisting of an extracellular domain of the cell surface glycoprotein fused to an immunoglobulin constant (Fc) region (see e.g., Capon et al. (1989) Nature 337:525-531 and Capon U.S. Pat. Nos. 5,116,964 and 5,428,130 [CD4-IgG1 constructs]; Linsley, et al. (1991) J. Exp. Med. 173:721-730 [a CD28-IgG1 construct and a B7-1-IgG1 construct]; and Linsley et al. (1991) J. Exp. Med. 174:561-569 and U.S. Pat. No. 5,434,131[a CTLA4-IgG1]). Such fusion proteins have proven useful for modulating receptor-ligand interactions. Soluble derivatives of cell surface proteins of the tumor necrosis factor receptor (TNFR) superfamily proteins have been made consisting of an extracellular domain of the cell surface receptor fused to an immunoglobulin constant (Fc) region (See for example Moreland et al. (1997) N. Engl. J. Med. 337(3):141-147; van der Poll et al. (1997) Blood 89(10):3727-3734; and Ammann et al. (1997) J. Clin. Invest. 99(7):1699-1703.).

[0756] In yet another embodiment, the fusion protein comprises NEOKINE sequences (e.g., the NEOKINE CXC signature motif) fused to sequences form other CXC cytokines. For example, NEOKINE sequences C-terminal to and including the first conserved cysteine residues can be fused to N-terminal sequences of other non-NEOKINE chemokines (e.g., comprising from the N-terminal amino acid residue to the amino acid residue N-terminal to the first conserved cysteine).

[0757] The SPOIL or NEOKINE-immunoglobulin fusion proteins of the invention can be incorporated into pharmaceutical compositions and administered to a subject to inhibit an interaction between a SPOIL or NEOKINE protein and a SPOIL or NEOKINE target molecule on the surface of a cell, to thereby suppress SPOIL or NEOKINE-mediated signal transduction in vivo. The SPOIL or NEOKINE-immunoglobulin fusion proteins can be used to affect the bioavailability of a SPOIL or NEOKINE cognate ligand. Inhibition of the SPOIL or NEOKINE ligand/SPOIL or NEOKINE interaction may be useful therapeutically for both the treatment and modulation of inflammation and immune disorders, as well as modulating (e.g., promoting or inhibiting) immune cell responses, cell adhesion, and/or cell homing. Moreover, the SPOIL or NEOKINE-immunoglobulin fusion proteins of the invention can be used as immunogens to produce anti-SPOIL or NEOKINE antibodies in a subject, to purify SPOIL or NEOKINE ligands and in screening assays to identify molecules which inhibit the interaction of SPOIL or NEOKINE with a SPOIL or NEOKINE target molecule.

[0758] Preferably, a FTHMA-070, Tango85, Tango77, SPOIL, NEOKINE, Tango129 or A259 chimeric or fusion protein of the invention is produced by standard recombinant DNA techniques. For example, DNA fragments coding for the different polypeptide sequences are ligated together in-frame in accordance with conventional techniques, for example by employing blunt-ended or stagger-ended termini for ligation, restriction enzyme digestion to provide for appropriate termini, filling-in of cohesive ends as appropriate, alkaline phosphatase treatment to avoid undesirable joining, and enzymatic ligation. In another embodiment, the fusion gene can be synthesized by conventional techniques including automated DNA synthesizers. Alternatively, PCR amplification of gene fragments can be carried out using anchor primers which give rise to complementary overhangs between two consecutive gene fragments which can subsequently be annealed and reamplified to generate a chimeric gene sequence (see, e.g., Current Protocols in Molecular Biology, Ausubel et al. eds., John Wiley & Sons: 1992). Moreover, many expression vectors are commercially available that already encode a fusion moiety (e.g., a GST polypeptide). An FTHMA-070, Tango85, Tango77, SPOIL, NEOKINE, Tango129 or A259-encoding nucleic acid can be cloned into such an expression vector such that the fusion moiety is linked in-frame to the FTHMA-070, Tango85, Tango77, SPOIL, NEOKINE, Tango129 or A259 protein.

[0759] A signal sequence of a polypeptide of the invention (SEQ ID NO:149 and 163) can be used to facilitate secretion and isolation of the secreted protein or other proteins of interest. Signal sequences are typically characterized by a core of hydrophobic amino acids which are generally cleaved from the mature protein during secretion in one or more cleavage events. Such signal peptides contain processing sites that allow cleavage of the signal sequence from the mature proteins as they pass through the secretory pathway. Thus, the invention pertains to the described polypeptides having a signal sequence, as well as to the signal sequence itself and to the polypeptide in the absence of the signal sequence (i.e., the cleavage products). In one embodiment, a nucleic acid sequence encoding a signal sequence of the invention can be operably linked in an expression vector to a protein of interest, such as a protein which is ordinarily not secreted or is otherwise difficult to isolate. The signal sequence directs secretion of the protein, such as from a eukaryotic host into which the expression vector is transformed, and the signal sequence is subsequently or concurrently cleaved. The protein can then be readily purified from the extracellular medium by art recognized methods. Alternatively, the signal sequence can be linked to the protein of interest using a sequence which facilitates purification, such as with a GST domain.

[0760] In another embodiment, the signal sequences of the present invention can be used to identify regulatory sequences, e.g., promoters, enhancers, repressors. Since signal sequences are the most amino-terminal sequences of a peptide, it is expected that the nucleic acids which flank the signal sequence on its amino-terminal side will be regulatory sequences which affect transcription. Thus, a nucleotide sequence which encodes all or a portion of a signal sequence can be used as a probe to identify and isolate signal sequences and their flanking regions, and these flanking regions can be studied to identify regulatory elements therein.

[0761] The present invention also pertains to variants of the FTHMA-070, Tango85, Tango77, SPOIL, NEOKINE, Tango129 or A259 proteins which function as either FTHMA-070, Tango85, Tango77, SPOIL, NEOKINE, Tango129 or A259 agonists (mimetics) or as FTHMA-070, Tango85, Tango77, SPOIL, NEOKINE, Tango129 or A259 antagonists. Variants of the FTHMA-070, Tango85, Tango77, SPOIL, NEOKINE, Tango129 or A259 protein can be generated by mutagenesis, e.g., discrete point mutation or truncation of the FTHMA-070, Tango85, Tango77, SPOIL, NEOKINE, Tango129 or A259 protein. An agonist of the FTHMA-070, Tango85, Tango77, SPOIL, NEOKINE, Tango129 or A259 protein can retain substantially the same, or a subset, of the biological activities of the naturally occurring form of the FTHMA-070, Tango85, Tango77, SPOIL, NEOKINE, Tango129 or A259 protein. An antagonist of the FTHMA-070, Tango85, Tango77, SPOIL, NEOKINE, Tango129 or A259 protein can inhibit one or more of the activities of the naturally occurring form of the FTHMA-070, Tango85, Tango77, SPOIL, NEOKINE, Tango129 or A259 protein by, for example, competitively binding to a downstream or upstream member of a cellular signaling cascade which includes the FTHMA-070, Tango85, Tango77, SPOIL, NEOKINE, Tango129 or A259 protein. Thus, specific biological effects can be elicited by treatment with a variant of limited function. Treatment of a subject with a variant having a subset of the biological activities of the naturally occurring form of the protein can have fewer side effects in a subject relative to treatment with the naturally occurring form of the FTHMA-070, Tango85, Tango77, SPOIL, NEOKINE, Tango129 or A259 proteins.

[0762] In one embodiment, a SPOIL protein which acts as an IL-1 receptor antagonist can be converted into an IL-1 agonist by site specific mutagenesis. For example, the aspartic acid at amino acid residue 91 of SEQ ID NO:90 or amino acid residue 74 of SEQ ID NO:93, can be substituted with a lysine to create an IL-1 agonist. In a similar manner, the alanine at amino acid residue 162 of SEQ ID NO:102 or the alanine residue at amino acid residue 201 of SEQ ID NO:105 can be substituted with a lysine to create an IL-1 agonist. Exemplary methods of converting IL-1ra into an IL-1 agonist are set forth in Ju et al. (1991) Proc. Natl. Acad. Sci. USA 88:2658-2662.

[0763] Variants of the FTHMA-070, Tango85, Tango77, SPOIL, NEOKINE, Tango129 or A259 protein which function as either FTHMA-070, Tango85, Tango77, SPOIL, NEOKINE, Tango129 or A259 agonists (mimetics) or as FTHMA-070, Tango85, Tango77, SPOIL, NEOKINE, Tango129 or A259 antagonists can be identified by screening combinatorial libraries of mutants, e.g., truncation mutants, of the FTHMA-070, Tango85, Tango77, SPOIL, NEOKINE, Tango129 or A259 protein for FTHMA-070, Tango85, Tango77, SPOIL, NEOKINE, Tango129 or A259 protein agonist or antagonist activity. In one embodiment, a variegated library of FTHMA-070, Tango85, Tango77, SPOIL, NEOKINE, Tango129 or A259 variants is generated by combinatorial mutagenesis at the nucleic acid level and is encoded by a variegated gene library. A variegated library of FTHMA-070, Tango85, Tango77, SPOIL, NEOKINE, Tango129 or A259 variants can be produced by, for example, enzymatically ligating a mixture of synthetic oligonucleotides into gene sequences such that a degenerate set of potential FTHMA-070, Tango85, Tango77, SPOIL, NEOKINE, Tango129 or A259 sequences is expressible as individual polypeptides, or alternatively, as a set of larger fusion proteins (e.g., for phage display) containing the set of FTHMA-070, Tango85, Tango77, SPOIL, NEOKINE, Tango129 or A259 sequences therein. There are a variety of methods which can be used to produce libraries of potential FTHMA-070, Tango85, Tango77, SPOIL, NEOKINE, Tango129 or A259 variants from a degenerate oligonucleotide sequence. Chemical synthesis of a degenerate gene sequence can be performed in an automatic DNA synthesizer, and the synthetic gene then ligated into an appropriate expression vector. Use of a degenerate set of genes allows for the provision, in one mixture, of all of the sequences encoding the desired set of potential FTHMA-070, Tango85, Tango77, SPOIL, NEOKINE, Tango129 or A259 sequences. Methods for synthesizing degenerate oligonucleotides are known in the art (see, e.g., Narang (1983) Tetrahedron 39:3; Itakura et al. (1984) Annu. Rev. Biochem. 53:323; Itakura et al. (1984) Science 198:1056; Ike et al. (1983) Nucleic Acid Res. 11:477).

[0764] In addition, libraries of fragments of the FTHMA-070, Tango85, Tango77, SPOIL, NEOKINE, Tango129 or A259 protein coding sequence can be used to generate a variegated population of FTHMA-070, Tango85, Tango77, SPOIL, NEOKINE, Tango129 or A259 fragments for screening and subsequent selection of variants of a FTHMA-070, Tango85, Tango77, SPOIL, NEOKINE, Tango129 or A259 protein. In one embodiment, a library of coding sequence fragments can be generated by treating a double stranded PCR fragment of a FTHMA-070, Tango85, Tango77, SPOIL, NEOKINE, Tango129 or A259 coding sequence with a nuclease under conditions wherein nicking occurs only about once per molecule, denaturing the double stranded DNA, renaturing the DNA to form double stranded DNA which can include sense/antisense pairs from different nicked products, removing single stranded portions from reformed duplexes by treatment with S1 nuclease, and ligating the resulting fragment library into an expression vector. By this method, an expression library can be derived which encodes N-terminal and internal fragments of various sizes of the FTHMA-070, Tango85, Tango77, SPOIL, NEOKINE, Tango129 or A259 protein.

[0765] Several techniques are known in the art for screening gene products of combinatorial libraries made by point mutations or truncation, and for screening cDNA libraries for gene products having a selected property. Such techniques are adaptable for rapid screening of the gene libraries generated by the combinatorial mutagenesis of FTHMA-070, Tango85, Tango77, SPOIL, NEOKINE, Tango129 or A259 proteins. The most widely used techniques, which are amenable to high through-put analysis, for screening large gene libraries typically include cloning the gene library into replicable expression vectors, transforming appropriate cells with the resulting library of vectors, and expressing the combinatorial genes under conditions in which detection of a desired activity facilitates isolation of the vector encoding the gene whose product was detected. Recursive ensemble mutagenesis (REM), a technique which enhances the frequency of functional mutants in the libraries, can be used in combination with the screening assays to identify FTHMA-070, Tango85, Tango77, SPOIL, NEOKINE, Tango129 or A259 variants (Arkin and Yourvan (1992) Proc. Natl. Acad. Sci. USA 89:7811-7815; Delgrave et al. (1993) Protein Engineering 6(3):327-331).

[0766] In one embodiment, cell based assays can be exploited to analyze a variegated SPOIL library. For example, a library of expression vectors can be transfected into a cell line which ordinarily responds to a particular ligand in a SPOIL-dependent manner. The transfected cells are then contacted with the ligand and the effect of expression of the mutant on signaling by the ligand can be detected, e.g., by measuring any of a number of immune cell responses. Plasmid DNA can then be recovered from the cells which score for inhibition, or alternatively, potentiation of ligand induction, and the individual clones further characterized.

[0767] In one embodiment, cell based assays can be exploited to analyze a variegated NEOKINE library. For example, a library of expression vectors can be transfected into a cell line which ordinarily responds to a particular ligand in a NEOKINE-dependent manner. The transfected cells are then contacted with the ligand and the effect of expression of the mutant on signaling by the ligand can be detected, e.g., by measuring any of a number of inflammatory or angiogenic responses. Plasmid DNA can then be recovered from the cells which score for inhibition, or alternatively, potentiation of ligand induction, and the individual clones further characterized.

[0768] An isolated FTHMA-070, Tango85, Tango77, SPOIL, NEOKINE, Tango129 or A259 protein, or a portion or fragment thereof, can be used as an immunogen to generate antibodies that bind FTHMA-070, Tango85, Tango77, SPOIL, NEOKINE, Tango129 or A259 using standard techniques for polyclonal and monoclonal antibody preparation. The full-length FTHMA-070, Tango85, Tango77, SPOIL, NEOKINE, Tango129 or A259 protein can be used or, alternatively, the invention provides antigenic peptide fragments of FTHMA-070, Tango85, Tango77, SPOIL, NEOKINE, Tango129 or A259 for use as immunogens.

[0769] The antigenic peptide of FTHMA-070 or T85 comprises at least 8 (preferably 10, 15, 20, or 30) amino acid residues of the amino acid sequence shown in SEQ ID NO:54 and encompasses an epitope of FTHMA-070 or T85 such that an antibody raised against the peptide forms a specific immune complex with FTHMA-070 or T85. Preferred epitopes encompassed by the antigenic peptide are regions of FTHMA-070 or T85 that are located on the surface of the protein, e.g., hydrophilic regions.

[0770] The antigenic peptide of Tango-77 comprises at least 8 (preferably 10, 15, 20, or 30) amino acid residues of the amino acid sequence shown in SEQ ID NO:72, SEQ ID NO:75, SEQ ID NO:77, SEQ ID NO:79, SEQ ID NO:81 or SEQ ID NO:83 and encompasses an epitope of Tango-77 such that an antibody raised against the peptide forms a specific immune complex with Tango-77.

[0771] The antigenic peptide of SPOIL comprises at least 8 amino acid residues of the amino acid sequence shown in SEQ ID NO:90, SEQ ID NO:102, SEQ ID NO:105, SEQ ID NO:113, the amino acid sequence encoded by the DNA insert of the plasmid deposited with ATCC as Accession Number 98883, or the amino acid sequence encoded by the DNA insert of the plasmid deposited with ATCC as Accession Number 98984, and encompasses an epitope of SPOIL such that an antibody raised against the peptide forms a specific immune complex with SPOIL. Preferably, the antigenic peptide comprises at least 10 amino acid residues, more preferably at least 15 amino acid residues, even more preferably at least 20 amino acid residues, and most preferably at least 30 amino acid residues.

[0772] The antigenic peptide of NEOKINE comprises at least 8 amino acid residues of the amino acid sequence shown in SEQ ID NO:116, SEQ ID NO:119, SEQ ID NO:122, or SEQ ID NO:125 and encompasses an epitope of NEOKINE such that an antibody raised against the peptide forms a specific immune complex with NEOKINE. Preferably, the antigenic peptide comprises at least 10 amino acid residues, more preferably at least 15 amino acid residues, even more preferably at least 20 amino acid residues, and most preferably at least 30 amino acid residues. Preferred epitopes encompassed by the antigenic peptide are regions of NEOKINE that are located on the surface of the protein, e.g., hydrophilic regions.

[0773] The antigenic peptide of T129 comprises at least 8 (preferably 10, 15, 20, or 30) amino acid residues of the amino acid sequence shown in SEQ ID NO:138 and encompasses an epitope of T129 such that an antibody raised against the peptide forms a specific immune complex with T129.

[0774] The antigenic peptide of a259 comprises at least 8 (preferably 10, 15, 20, or 30) amino acid residues of the amino acid sequence of SEQ ID NO:147 or 165, and encompasses an epitope of the protein such that an antibody raised against the peptide forms a specific immune complex with the protein.

[0775] Preferred epitopes encompassed by the antigenic peptide are regions of T129 that are located on the surface of the protein, e.g., hydrophilic regions. A hydrophobicity analysis of the human T129 protein sequence indicates that the regions between, e.g., amino acids 120 and 130, between amino acids 140 and 160, and between amino acids 400 and 420 of SEQ ID NO:2 are particularly hydrophilic and, therefore, are likely to encode surface residues useful for targeting antibody production.

[0776] A T129 immunogen typically is used to prepare antibodies by immunizing a suitable subject, (e.g., rabbit, goat, mouse or other mammal) with the immunogen. An appropriate immunogenic preparation can contain, for example, recombinantly expressed T129 protein or a chemically synthesized T129 polypeptide. The preparation can further include an adjuvant, such as Freund's complete or incomplete adjuvant, or similar immunostimulatory agent. Immunization of a suitable subject with an immunogenic T129 preparation induces a polyclonal anti-T129 antibody response.

[0777] Preferred epitopes encompassed by the antigenic peptide are regions that are located on the surface of the A259 protein, e.g., hydrophilic regions. FIGS. 10 and 11 are hydropathy plots of the proteins of the invention. These plots or similar analyses can be used to identify hydrophilic regions.

[0778] A FTHMA-070, Tango85, Tango77, SPOIL, NEOKINE, Tango129 or A259 immunogen typically is used to prepare antibodies by immunizing a suitable subject, (e.g., rabbit, goat, mouse or other mammal) with the immunogen. An appropriate immunogenic preparation can contain, for example, recombinantly expressed FTHMA-070, Tango85, Tango77, SPOIL, NEOKINE, Tango129 or A259 protein or a chemically synthesized FTHMA-070, Tango85, Tango77, SPOIL, NEOKINE, Tango129 or A259 polypeptide. The preparation can further include an adjuvant, such as Freund's complete or incomplete adjuvant, or similar immunostimulatory agent. Immunization of a suitable subject with an immunogenic FTHMA-070, Tango85, Tango77, SPOIL, NEOKINE, Tango129 or A259 preparation induces a polyclonal anti-FTHMA-070, Tango85, Tango77, SPOIL, NEOKINE, Tango129 or A259 antibody response.

[0779] Accordingly, another aspect of the invention pertains to anti-FTHMA-070, Tango85, Tango77, SPOIL, NEOKINE, Tango129 or A259 antibodies. The term “antibody” as used herein refers to immunoglobulin molecules and immunologically active portions of immunoglobulin molecules, i.e., molecules that contain an antigen binding site which specifically binds an antigen, such as FTHMA-070, Tango85, Tango77, SPOIL, NEOKINE, Tango129 or A259. A molecule which specifically binds to FTHMA-070, Tango85, Tango77, SPOIL, NEOKINE, Tango129 or A259 is a molecule which binds FTHMA-070, Tango85, Tango77, SPOIL, NEOKINE, Tango129 or A259, but does not substantially bind other molecules in a sample, e.g., a biological sample, which naturally contains FTHMA-070, Tango85, Tango77, SPOIL, NEOKINE, Tango129 or A259. Examples of immunologically active portions of immunoglobulin molecules include F(ab) and F(ab′)₂ fragments which can be generated by treating the antibody with an enzyme such as pepsin. The invention provides polyclonal and monoclonal antibodies that bind FTHMA-070, Tango85, Tango77, SPOIL, NEOKINE, Tango129 or A259. The term “monoclonal antibody” or “monoclonal antibody composition”, as used herein, refers to a population of antibody molecules that contain only one species of an antigen binding site capable of immunoreacting with a particular epitope of FTHMA-070, Tango85, Tango77, SPOIL, NEOKINE, Tango129 or A259. A monoclonal antibody composition thus typically displays a single binding affinity for a particular FTHMA-070, Tango85, Tango77, SPOIL, NEOKINE, Tango129 or A259 protein with which it immunoreacts.

[0780] Polyclonal anti-FTHMA-070, Tango85, Tango77, SPOIL, NEOKINE, Tango129 or

[0781] A259 antibodies can be prepared as described above by immunizing a suitable subject with a FTHMA-070, Tango85, Tango77, SPOIL, NEOKINE, Tango129 or A259 immunogen. The anti-FTHMA-070, Tango85, Tango77, SPOIL, NEOKINE, Tango129 or A259 antibody titer in the immunized subject can be monitored over time by standard techniques, such as with an enzyme linked immunosorbent assay (ELISA) using immobilized FTHMA-070, Tango85, Tango77, SPOIL, NEOKINE, Tango129 or A259. If desired, the antibody molecules directed against FTHMA-070, Tango85, Tango77, SPOIL, NEOKINE, Tango129 or A259 can be isolated from the mammal (e.g., from the blood) and further purified by well-known techniques, such as protein A chromatography to obtain the IgG fraction. At an appropriate time after immunization, e.g., when the anti-FTHMA-070, Tango85, Tango77, SPOIL, NEOKINE, Tango129 or A259 antibody titers are highest, antibody-producing cells can be obtained from the subject and used to prepare monoclonal antibodies by standard techniques, such as the hybridoma technique originally described by Kohler and Milstein (1975) Nature 256:495-497, the human B cell hybridoma technique (Kozbor et al. (1983) Immunol Today 4:72), the EBV-hybridoma technique (Cole et al. (1985), Monoclonal Antibodies and Cancer Therapy, Alan R. Liss, Inc., pp. 77-96) or trioma techniques. The technology for producing various antibodies monoclonal antibody hybridomas is well known (see generally Current Protocols in Immunology (1994) Coligan et al. (eds.) John Wiley & Sons, Inc., New York, N.Y.). Briefly, an immortal cell line (typically a myeloma) is fused to lymphocytes (typically splenocytes) from a mammal immunized with a FTHMA-070, Tango85, Tango77, SPOIL, NEOKINE, Tango129 or A259 immunogen as described above, and the culture supernatants of the resulting hybridoma cells are screened to identify a hybridoma producing a monoclonal antibody that binds FTHMA-070, Tango85, Tango77, SPOIL, NEOKINE, Tango129 or A259.

[0782] Any of the many well known protocols used for fusing lymphocytes and immortalized cell lines can be applied for the purpose of generating an anti-FTHMA-070, Tango85, Tango77, SPOIL, NEOKINE, Tango129 or A259 monoclonal antibody (see, e.g., Current Protocols in Immunology, supra; Galfre et al. (1977) Nature 266:55052; R. H. Kenneth, in Monoclonal Antibodies: A New Dimension In Biological Analyses, Plenum Publishing Corp., New York, N.Y. (1980); and Lerner (1981) Yale J. Biol. Med., 54:387-402. Moreover, the ordinarily skilled worker will appreciate that there are many variations of such methods which also would be useful. Typically, the immortal cell line (e.g., a myeloma cell line) is derived from the same mammalian species as the lymphocytes. For example, murine hybridomas can be made by fusing lymphocytes from a mouse immunized with an immunogenic preparation of the present invention with an immortalized mouse cell line, e.g., a myeloma cell line that is sensitive to culture medium containing hypoxanthine, aminopterin and thymidine (“HAT medium”). Any of a number of myeloma cell lines can be used as a fusion partner according to standard techniques, e.g., the P3-NS1/1-Ag4-1, P3-x63-Ag8.653 or Sp2/O-Ag14 myeloma lines. These myeloma lines are available from ATCC. Typically, HAT-sensitive mouse myeloma cells are fused to mouse splenocytes using polyethylene glycol (“PEG”). Hybridoma cells resulting from the fusion are then selected using HAT medium, which kills unfused and unproductively fused myeloma cells (unfused splenocytes die after several days because they are not transformed). Hybridoma cells producing a monoclonal antibody of the invention are detected by screening the hybridoma culture supernatants for antibodies that bind FTHMA-070, Tango85, Tango77, SPOIL, NEOKINE, Tango129 or A259, e.g., using a standard ELISA assay.

[0783] Alternative to preparing monoclonal antibody-secreting hybridomas, a monoclonal anti-FTHMA-070, Tango85, Tango77, SPOIL, NEOKINE, Tango129 or A259 antibody can be identified and isolated by screening a recombinant combinatorial immunoglobulin library (e.g., an antibody phage display library) with FTHMA-070, Tango85, Tango77, SPOIL, NEOKINE, Tango129 or A259 to thereby isolate immunoglobulin library members that bind FTHMA-070, Tango85, Tango77, SPOIL, NEOKINE, Tango129 or A259. Kits for generating and screening phage display libraries are commercially available (e.g., the Pharmacia Recombinant Phage Antibody System, Catalog No. 27-9400-01; and the Stratagene SudZAP™ Phage Display Kit, Catalog No. 240612). Additionally, examples of methods and reagents particularly amenable for use in generating and screening antibody display library can be found in, for example, U.S. Pat. No. 5,223,409; PCT Publication No. WO 92/18619; PCT Publication No. WO 91/17271; PCT Publication WO 92/20791; PCT Publication No. WO 92/15679; PCT Publication WO 93/01288; PCT Publication No. WO 92/01047; PCT Publication No. WO 92/09690; PCT Publication No. WO 90/02809; Fuchs et al. (1991) Bio/Technology 9:1370-1372; Hay et al. (1992) Hum. Antibod. Hybridomas 3:81-85; Huse et al. (1989) Science 246:1275-1281; Griffiths et al. (1993) EMBO J. 12:725-734.

[0784] Additionally, recombinant anti-FTHMA-070, Tango85, Tango77, SPOIL, NEOKINE, Tango129 or A259 antibodies, such as chimeric and humanized monoclonal antibodies, comprising both human and non-human portions, which can be made using standard recombinant DNA techniques, are within the scope of the invention. Such chimeric and humanized monoclonal antibodies can be produced by recombinant DNA techniques known in the art, for example using methods described in PCT Application No. PCT/US86/02269; European Patent Application 184,187; European Patent Application 171,496; European Patent Application 173,494; PCT Publication No. WO 86/01533; U.S. Pat. No. 4,816,567; European Patent Application 125,023; Better et al. (1988) Science 240:1041-1043; Liu et al. (1987) Proc. Natl. Acad. Sci. USA 84:3439-3443; Liu et al. (1987) J. Immunol. 139:3521-3526; Sun et al. (1987) Proc. Natl. Acad. Sci. USA 84:214-218; Nishimura et al. (1987) Canc. Res. 47:999-1005; Wood et al. (1985) Nature 314:446-449; and Shaw et al. (1988) J. Natl. Cancer Inst. 80:1553-1559); Morrison, (1985) Science 229:1202-1207; Oi et al. (1986) Bio/techniques 4:214; U.S. Pat. No. 5,225,539; Jones et al. (1986) Nature 321:552-525; Verhoeyan et al. (1988) Science 239:1534; and Beidler et al. (1988) J. Immunol. 141:4053-4060.

[0785] Completely human antibodies are particularly desirable for therapeutic treatment of human patients. Such antibodies can be produced using transgenic mice which are incapable of expressing endogenous immunoglobulin heavy and light chains genes, but which can express human heave and light chain genes. The transgenic mice are immunized in the normal fashion with a selected antigen, e.g., all or a portion of Tango-77 or A259. Monoclonal antibodies directed against the antigen can be obtained using conventional hybridoma technology. The human immunoglobulin transgenes harbored by the transgenic mice rearrange during B cell differentiation, and subsequently undergo class switching and somatic mutation. Thus, using such a technique, it is possible to produce therapeutically useful IgG, IgA and IgE antibodies. For an overview of this technology for producing human antibodies, see Lonberg and Huszar (1995, Int. Rev. Immunol. 13:65-93). For a detailed discussion of this technology for producing human antibodies and human monoclonal antibodies and protocols for producing such antibodies, see, e.g., U.S. Pat. No. 5,625,126; U.S. Pat. No. 5,633,425; U.S. Pat. No. 5,569,825; U.S. Pat. No. 5,661,016; and U.S. Pat. No. 5,545,806. In addition, companies such as Abgenix, Inc. (Freemont, Calif.), can be engaged to provide human antibodies directed against a selected antigen using technology similar to the described above.

[0786] Completely human antibodies which recognize a selected epitope can be generated using a technique referred to as “guided selection.” In this approach a selected non-human monoclonal antibody, e.g., a murine antibody, is used to guide the selection of a completely human antibody recognizing the same epitope.

[0787] First, a non-human monoclonal antibody which binds a selected antigen (epitope), e.g., an antibody which inhibits Tango-77 or A259 activity, is identified. The heave chain and the light chain of the non-human antibody are cloned and used to create phage display Fab fragments. For example, the heave chain gene can be cloned into a plasmid vector so that the heavy chain can be secreted from bacteria. The light chain gene can be cloned into a phage coat protein gene so that the light chain can be expressed on the surface of phage. A repertoire (random collection) of human light chains fused to phage is used to infect the bacteria which express the non-human heavy chain. The resulting progeny phage display hybrid antibodies (human light chain/non-human heavy chain). The selected antigen is used in a panning screen to select phage which bind the selected antigen. Several rounds of selection may be required to identify such phage. Next, human light chain genes are isolated from the selected phage which bind the selected antigen. These selected human light chain genes are then used to guide the selection of human heavy chain genes as follows. The selected human light chain genes are inserted into vectors for expression by bacteria. Bacteria expressing the selected human light chains are infected with a repertoire of human heavy chains fused to phage. The resulting progeny phage display human antibodies (human light chain/human heavy chain).

[0788] Next, the selected antigen is used in a panning screen to select phage which bind the selected antigen. The phage selected in this step display completely human antibody which recognize the same epitope recognized by the original selected, non-human monoclonal antibody. The genes encoding both the heavy and light chains are readily isolated and be further manipulated for production of human antibody. This technology is described by Jespers et al. (1994, Bio/technology 12:899-903).

[0789] An anti-FTHMA-070, Tango85, Tango77, SPOIL, NEOKINE, Tango129 or A259 antibody (e.g.; monoclonal antibody) can be used to isolate FTHMA-070, Tango85, Tango77, SPOIL, NEOKINE, Tango129 or A259 by standard techniques, such as affinity chromatography or immunoprecipitation. An anti-FTHMA-070, Tango85, Tango77, SPOIL, NEOKINE, Tango129 or A259 antibody can facilitate the purification of natural FTHMA-070, Tango85, Tango77, SPOIL, NEOKINE, Tango129 or A259 from cells and of recombinantly produced FTHMA-070, Tango85, Tango77, SPOIL, NEOKINE, Tango129 or A259 expressed in host cells. Moreover, an anti-FTHMA-070, Tango85, Tango77, SPOIL, NEOKINE, Tango129 or A259 antibody can be used to detect FTHMA-070, Tango85, Tango77, SPOIL, NEOKINE, Tango129 or A259 protein (e.g., in a cellular lysate or cell supernatant) in order to evaluate the abundance and pattern of expression of the FTHMA-070, Tango85, Tango77, SPOIL, NEOKINE, Tango129 or A259 protein. Anti-FTHMA-070, Tango85, Tango77, SPOIL, NEOKINE, Tango129 or A259 antibodies can be used diagnostically to monitor protein levels in tissue as part of a clinical testing procedure, e.g., to, for example, determine the efficacy of a given treatment regimen. Detection can be facilitated by coupling the antibody to a detectable substance. Examples of detectable substances include various enzymes, prosthetic groups, fluorescent materials, luminescent materials, bioluminescent materials, and radioactive materials. Examples of suitable enzymes include horseradish peroxidase, alkaline phosphatase, β-galactosidase, or acetylcholinesterase; examples of suitable prosthetic group complexes include streptavidin/biotin and avidin/biotin; examples of suitable fluorescent materials include umbelliferone, fluorescein, fluorescein isothiocyanate, rhodamine, dichlorotriazinylamine fluorescein, dansyl chloride or phycoerythrin; an example of a luminescent material includes luminol; examples of bioluminescent materials include luciferase, luciferin, and aequorin, and examples of suitable radioactive material include ¹²⁵I, ¹³¹I, ³⁵S or ³H.

### Delta3 Methods of Treating Disease

[0790] Based at least in part on the fact that the Notch signaling pathway has been implicated in development of the nervous system, in particular in regulating neuronal differentiation and vasculature, e.g., CNS vasculature, a wide variety of pathological diseases or conditions can benefit from treatment with Delta3 nucleic acids, proteins, and modulators thereof. In particular, based at least in part on the observation that PS1 and PS2, genes encoding amyloid precursor proteins, which are mutated in about 10% of cases of Alzheimer's disease, are functionally linked to the Notch signaling pathway, mutations in genes of the Notch signaling pathway, e.g., Delta genes, could also result in Alzheimer's disease or other neurodegenerative or neuro-developmental diseases. The Notch signaling pathway plays a role in the development of vasculature. For example, loss of Dll1 function mutants become severally hemorrhagic after embryonic day 10. Furthermore, mutations in Notch3 result in CADASIL, a disease characterized by stroke. In addition, mice with a functionally ablated PS1 gene exhibit hemorrhages in the brain and/or spinal cord after embryonic day 11.5 (Wong et al. (1997) Nature 387:288). In addition, the Notch pathway has been implicated in hematologic development. Specifically, molecules in the Notch signaling pathway have been shown to be expressed in a wide variety of blood cells, including but not limited to those of myeloid and lymphoid origins. Notch-1 was shown to play a role in T-cell development. Furthermore, since the Notch signaling pathway is involved in cell fate determination at least in the nervous system, immune system and endothelial system, it is likely that the Notch signaling pathway, and in particular Delta3 is involved in cell fate determination in additional biological systems. Accordingly, the invention also provides methods for treating diseases or disorders arising from an abnormal cell proliferation and/or differentiation of cells other than cells from the nervous system, immune system, and vasculature.

[0791] Among the disorders that can be treated or prevented according to the methods of the invention include pathological neurogenic, neoplastic or hyperplastic conditions. Neurologic diseases, e.g., neurodegenerative, neuro-differentiative and neuro-developmental diseases, that might benefit from this methodology include, but are not limited to neuropathies, e.g., peripheral neuropathy such as ACCPN, stroke, dementia, e.g., cerebral autosomal dominant arteriopathy with subcortical infarcts and leukoencephalopathy (CADASIL), degenerative lesions (Parkinson's disease, Alzheimer's disease, Huntington's chorea, amyotrophic lateral sclerosis, spinocerebellar degenerations), demyelating diseases (multiple sclerosis, human immunodeficiency associated myelopathy, transverse myelopathy, progressive multifocal leukoencephalopathy, pontine myelinolysis), motor neuron injuries, progressive spinal muscular atrophy, progressive bulbar palsy, primary lateral sclerosis, infantile and juvenile muscular atrophy, progressive bulbar paralysis of childhood (Fazio-Londe syndrome), poliomyelitis, and hereditary motorsensory neuropathy (Charcot-Marie-Tooth disease), spinal cord injuries, brain injuries, lesions associated with surgery, ischemic lesions, malignant lesions, infectious lesions.

[0792] Additional neurological diseases that can be treated according to the method of the invention include neuropathies, e.g., peripheral neuropathies, e.g., Agenesis of the Corpus Callosum with Peripheral Neuropathy (ACCPN). In fact, as set forth in the examples presented below, hDelta3 has been mapped to human chromosome 15 close to framework markers D15S1244 and D15S144, a chromosomal region which has been shown to be genetically linked (ACCPN) (Casaubon et al. (1996) Am J. Hum. Genet. 58:28). The disease is characterized by a progressive peripheral neuropathy caused by axonal degeneration and a central nervous system (CNS) malformation characterized by the absence of hypoplasia of the corpus callosum. The disorder appears early in life, is progressive and results in death in the third decade of life of the subject.

[0793] Neuropathies refer to disorders of peripheral nerves and includes both motor and sensory functions, since most motor and sensory axons run in the same nerves. Neurophathies may be either chronic or acute. One example of a acute neuropathy is the Guillain-Barre syndrome, which often follow respiratory infection. Chronic neuropathies include, e.g., acute intermittent porphyria, Charcot-Marie-Tooth disease, metabolic diseases such as diabetes, obesity, and B12 deficiency, intoxication, nutritional disorders.

[0794] Disorders of the vasculature, also termed “vascular disorders”, in addition to CADASIL and stroke, that can be treated or prevented according to the methods of the invention include atheroma, tumor angiogenesis, wound healing, diabetic retinopathy, hemangioma, psoriasis, and restenosis, e.g., restenosis resulting from balloon angioplasty.

[0795] In one embodiment, diseases or disorders caused or contributed to by aberrant Delta3 activity, such as aberrant Delta3 protein levels or an aberrant biological activity or which are associated with one or more specific Delta3 alleles, e.g., a mutant Delta3 allele, can be treated with Delta3 therapeutics. Aberrant protein levels can be caused, e.g., by aberrant gene expression. Such aberrant activity can result, for example, in aberrant cell proliferation and/or differentiation or cell death. For example, aberrant Delta3 activity in a subject can result in increased proliferation of certain cells in the subject. Subjects having a disorder characterized by abnormal cell proliferation can be treated by administration of a Delta3 therapeutic inhibiting or decreasing such proliferation. The specific Delta3 therapeutic used may vary depending on the type of the cell that is proliferating aberrantly. The appropriate Delta3 therapeutic to use can be determined, e.g., by in vitro culture of a sample of such cells which can be obtained from the subject, in the presence and in the absence of Delta3 therapeutics.

[0796] Diseases or conditions associated with aberrant cell proliferation which can be treated or prevented with Delta3 therapeutics include cancers, malignant conditions, premalignant conditions, benign conditions. The condition to be treated or prevented can be a solid tumor, such as a tumor arising in an epithelial tissue. For example, the cancer can be colon or cervix cancer. Cancer of the colon and cervix have in fact been found to have increased levels of expression of Notch as compared to normal tissue (PCT Publication No. WO/07474, Apr. 14, 1994). Accordingly, treatment of such a cancer could comprise administration to the subject of a Delta3 therapeutic decreasing the interaction of Notch with Delta3. Other cancers that can be treated or prevented with a Delta3 protein include sarcomas and carcinomas, e.g., lung cancer, cancer of the esophagus, lung cancer, melanoma, seminoma, and squamous adenocarcinoma. Additional solid tumors within the scope of the invention include those that can be found in a medical textbook. The condition to be treated or prevented can also be a soluble tumor, such as leukemia, either chronic or acute, including chronic or acute myelogenous leukemia, chronic or acute lymphocytic leukemia, promyelocytic leukemia, monocytic leukemia, myelomonocytic leukemia, and erythroleukemia. Yet other proliferative disorders that can be treated with a Delta3 therapeutic of the invention include heavy chain disease, multiple myeloma, lymphoma, e.g., Hodgkin's lymphoma and non-Hodgkin's lymphoma, Waldenstroem's macroglobulemia, and fibroproliferative disorders, particularly of cerebravascular tissue.

[0797] Diseases or conditions characterized by a solid or soluble tumor can be treated by administrating a Delta3 therapeutic either locally or systemically, such that proliferation of the cells having an aberrant proliferation is inhibited or decreased. Methods for administering the compounds of the invention are further described below.

[0798] The invention also provides methods for preventing the formation and/or development of tumors. For example, the development of a tumor can be preceded by the presence of a specific lesion, such as a pre-neoplastic lesion, e.g., hyperplasia, metaplasia, and dysplasia. Such lesions can be found, e.g., in epithelial tissue. Thus, the invention provides a method for inhibiting progression of such a lesion into a neoplastic lesion, comprising administering to the subject having a preneoplastic lesion a amount of a Delta3 therapeutic sufficient to inhibit progression of the preneoplastic lesion into a neoplastic lesion.

[0799] In a preferred embodiment, the invention provides a method for inhibiting endothelial cell proliferation and/or differentiation, comprising contacting a Delta3 therapeutic with a tissue in which endothelial cells are proliferating, such as a developing tumor or a hyperproliferative disease, i.e., a disease associated with abnormal cellular proliferation. Blocking the proliferation of endothelial cells will result in inhibition of development of endothelium and blood vessels, thus limiting access to the tumor of compounds necessary for tumor development.

[0800] The invention also provides for methods for treating or preventing diseases or conditions associated with insufficient cell proliferation. For example, Delta3 therapeutics can be used to stimulate tissue repair, regeneration, and/or wound healing, e.g., of neural tissue, such as after surgery or to stimulate tissue healing from burns. Other disease in which proliferation of cells is desired are hypoproliferative diseases, i.e., diseases characterized by an abnormally low proliferation of certain cells.

[0801] In yet another embodiment, the invention provides a method for treating or preventing diseases or conditions characterized by aberrant cell differentiation. Accordingly, the invention provides methods for stimulating cellular differentiation in conditions characterized by an inhibition of normal cell differentiation which may or may not be accompanied by excessive proliferation. Alternatively, Delta3 therapeutics can be used to inhibit differentiation of specific cells.

[0802] In one method, the aberrantly proliferating and/or differentiating cell is a cell present in the nervous system. Accordingly, the invention provides methods for treating diseases or conditions associated with a central or peripheral nervous system. For example, the invention provides methods for treating lesions of the nervous system involving an aberrant Delta3 activity in neurons, in Schwann cells, glial cells, or other types of neural cells. Disorders of the nervous system are set forth above.

[0803] In another embodiment, a Delta3 therapeutic can be utilized to ameliorate a symptom of obesity and/or disorders that accompany or are exacerbated by an obese state, such as cardiovascular and circulatory disorders, metabolic abnormalities typical of obesity, such as hyperinsulinemia, insulin resistance, diabetes, including non-insulin dependent diabetes mellitus (NIDDM), insulin dependent diabetes mellitus (IDDM), and maturity onset diabetes of the young (MODY), disorders of energy homeostasis, disorders associated with lipid metabolism, such as cachexia.

[0804] With respect to cardiovascular disorders, symptoms of coronary diseases (e.g., cardiovascular diseases including unstable angina pectoris, myocardial infarction, acute myocardial infarction, coronary artery disease, coronary revascularization, coronary restenosis, ventricular thromboembolism, atherosclerosis, coronary artery disease (e.g., arterial occlusive disorders), plaque formation, cardiac ischemia, including complications related to coronary procedures, such as percutaneous coronary artery angioplasty (balloon angioplasty) procedures) can be ameliorated. With respect to coronary procedures, such modulation can be achieved via administration of Delta3 therapeutics prior to, during, or subsequent to the procedure.

[0805] Delta3 therapeutics (e.g., nucleic acids, proteins and modulators thereof) can, therefore, be used to modulate disorders resulting from any blood vessel insult that can result in platelet aggregation. Such blood vessel insults include, but are not limited to, vessel wall injury, such as vessel injuries that result in a highly thrombogenic surface exposed within an otherwise intact blood vessel e.g., vessel wall injuries that result in release of ADP, thrombin and/or epinephrine, fluid shear stress that occurs at the site of vessel narrowing, ruptures and/or tears at the sites of atherosclerotic plaques, and injury resulting from balloon angioplasty or atherectomy. Preferably, such therapeutics do not effect initial platelet adhesion to vessel surfaces, or effect such adhesion to a relatively lesser extent than the effect on platelet-platelet aggregation, e.g., unregulated platelet-platelet aggregation, following the initial platelet adhesion.

[0806] In addition, Delta3 therapeutics can be utilized to amieliorate a symptom of disorders associated with abnormal vasculogenesis (e.g., cancers, including, but not limited to, cancers of the epithelia (e.g., carcinomas of the pancreas, stomach, liver, secretory glands (e.g., adenocarcinoma), bladder, lung, breast, skin (e.g., fibromatosis or malignant melanoma), reproductive tract including prostate gland, ovary, cervix and uterus); cancers of the hematopoietic and immune system (e.g., leukemias and lymphomas); cancers of the central nervous, brain system and eye (e.g., gliomas, neuroblastoma and retinoblastoma); and cancers of connective tissues, bone, muscles and vasculature (e.g., hemangiomas and sarcomas)), disorders related to fetal development, in particular, disorders involving development of lung and kidney, lung-related disorders, and immune-related disorders, such as inflammatory-related disorders, e.g., asthma, allergy, and autoimmune disorders, as well as neurological disorders, including developmental, cognitive and personality-related disorders, renal disorders, adrenal gland-related disorders; and disorders relating to skeletal muscle, such as dystrophic disorders.

[0807] With respect to immune disorders, Delta3 therapeutics (e.g., nucleic acids, proteins and modulators thereof) can be utilized to modulate processes involved in lymphocyte development, differentiation and activity, including, but not limited to development, differentiation and activation of T cells, including T helper, T cytotoxic and non-specific T killer cell types and subtypes, and B cells, immune functions associated with such cells, and amelioration of one or more symptoms associated with abnormal function of such cell types. Such disorders can include, but are not limited to, autoimmune disorders, such as organ specific autoimmune disorders, e.g., autoimmune thyroiditis, Type I diabetes mellitus, insulin-resistant diabetes, autoimmune anemia, multiple sclerosis, and/or systemic autoimmune disorders, e.g., rheumatoid arthritis, lupus or sclerodoma, allergy, including allergic rhinitis and food allergies, asthma, psoriasis, graft rejection, transplantation rejection, graft versus host disease, pathogenic susceptibilities, e.g., susceptibility to certain bacterial or viral pathogens, wound healing and inflammatory reactions.

[0808] With respect to skeletal muscle-related disorders, Delta3 therapeutics can be utilized to ameliorate symptoms of disorders including, for example, muscular dystrophy disorders, e.g., Duchenne's muscular dystrophy and X-linked recessive Emery-Dreifuss dystrophy (EDMD), as well as developmental and other disorders that involve skeletal muscle such as, for example, oculofacial-skeletal myorhythmias, sarcoidosis, and malignant hyperthermia susceptibility (MHS).

[0809] With respect to lung disorders, Delta3 therapeutics can be utilized, for exampe, to ameliorate a symptom of such pulmonary disorders, such as atelectasis, pulmonary congestion or edema, chronic obstructive airway disease (e.g., emphysema, chronic bronchitis, bronchial asthma, and bronchiectasis), diffuse interstitial diseases (e.g., sarcoidosis, pneumoconiosis, hypersensitivity pneumonitis, Goodpasture's syndrome, idiopathic pulmonary hemosiderosis, pulmonary alveolar proteinosis, desquamative interstitial pneumonitis, chronic interstitial pneumonia, fibrosing alveolitis, hamman-rich syndrome, pulmonary eosinophilia, diffuse interstitial fibrosis, Wegener's granulomatosis, lymphomatoid granulomatosis, and lipid pneumonia), or tumors (e.g., bronchogenic carcinoma, bronchiolovlveolar carcinoma, bronchial carcinoid, hamartoma, and mesenchymal tumors).

[0810] In another embodiment, the invention provides a method for enhancing the survival and/or stimulating proliferation and/or differentiation of cells and tissues in vitro. For example, tissues from a subject can be obtained and grown in vitro in the presence of a Delta3 therapeutic, such that the tissue cells are stimulated to proliferate and/or differentiate. The tissue can then be readministered to the subject.

[0811] In another embodiment, as Notch can function to maintain cells in an immature state in vitro, i.e., as stem cells, e.g., the invention provides a method to expand the pool of hematopoietic stem cells through the interaction of Delta3 with Notch, which can be utilized in cases where it is desirable to do so including, but not limited to preparing cells harvested for subsequent bone marrow transplantation. Thus, Delta 3 can be utilized in stem cell preservation, that is, can be utilized to preserve stem cells in an immature, undifferentiated state, and/or preserving the stem cells' pluripotency, differentiation potential and proliferation potential. In one embodiment of such a stem cell preservation method, stem cells are contacted with cells expressing Delta3 and exhibiting Delta3 on their cell surfaces. Such Delta3-expressing cells can be presented, e.g., as stromal cells in culture. In another embodiment, stem cells are contacted with full-length or soluble Delta3 attached to a solid surface, e.g., a culture plate, or microbeads.

[0812] In another embodiment, techniques such as that described above for stem cell preservation can be utilized to prevent death of CD4⁺/CD8⁺ T cells. Thus, such techniques can be used to repopulate peripheral T cell populations (e.g., as part of a leukemia therapy), or, and alternatively, can be used to produce and screen for an antigen-specific T cell clone.

[0813] In another embodiment, the invention can function as a method to determine the fate of T cells in the developing thymus. Antagonists or antagonists of hDelta3 activity can determine whether a T cell will develop the CD4 or CD8 phenotype and thus be useful as a therapeutic agent in immunodeficiency disorders, such as, but not limited to AIDS.

[0814] In another embodiment, as the Notch signaling pathway has been shown to be involved in eye development in Drosophila, and given the fact that mDelta3 was highly expressed in the developing mouse eye, Delta3 nucleic acids, proteins, and modulators thereof and/or agonists and antagonists can be used as therapeutics in such eye disorders as diabetic retinopathy, characterized by a hyper-proliferation of capillaries in the retina.

[0815] Since, in some cases, genes may be upregulated in a disease state and in other cases may be down-regulated, it will be desirable to activate and/or potentiate or suppress and/or down-modulate Delta3 activity depending on the condition to be treated using the techniques compounds and methods described herein. Some genes may be under-expressed in certain disease states. The activity of Delta3 nucleic acids, proteins, and modulators thereof may be in some way impaired, leading to the development of neurodegenerative disease symptoms. Such down-regulation of Delta3 gene expression or decrease in the activity of a Delta3 protein may have a causative or exacerbating effect on the disease state.

[0816] Among the approaches which may be used to ameliorate disease symptoms involving the misexpression of a Delta3 gene are, for example, antisense, ribozyme, and triple helix molecules described above. Compounds that compete with Delta3 nucleic acids, proteins, and modulators thereof for binding to upstream or downstream elements in a Delta/Notch signaling cascade will antagonize Delta3 nucleic acids, proteins, and modulators thereof, thereby inducing a therapeutic effect. Examples of suitable compounds include the antagonists or homologs described in detail above. In other instances, the increased expression or activity of Delta3 nucleic acids, proteins, and modulators thereof may be desirable and may be accomplished by, for example the use of Delta3 agonists or mimetics or by gene replacement therapy, as described herein.

[0817] Yet other Delta3 therapeutics comprise of a first peptide comprising a Delta3 peptide capable of binding to a receptor, e.g., a Notch receptor, and a second peptide which is cytotoxic. Such therapeutics can be used to specifically target and lyse cells expressing or over-expressing a receptor for Delta3. For example, a fusion protein containing a Delta3 peptide fused to a cytotoxic peptide can be used to eliminate or reduce a tumor over-expressing Notch, e.g., colon and cervix neoplastic tumors. Alternatively, cells expressing or over-expressing Delta3 can be targeted for lysis, by, for example, targeting to the cell an antibody binding specifically to a Delta3 protein linked to a cytotoxic peptide.

[0818] Based at least in part on the similarity of protein structure, it is likely that Delta3 nucleic acids, proteins, and modulators thereof can also be used to treat diseases or conditions caused by or contributed by an aberrant activity of a Delta family gene product, e.g., an aberrant Delta1 or Delta2 activity or diseases or disorders which are associated with one or more specific Delta alleles, e.g., Delta1 or Delta2 alleles. Such diseases or conditions could include neurological diseases and cancer. Similarly, Delta therapeutics, e.g., Delta1 or Delta2 therapeutics, could be used to prevent or treat diseases or disorders caused by or contributed to by an aberrant Delta3 activity, or diseases or disorders which are associated with a specific Delta3 allele. Delta therapeutics can be prepared using, e.g., the nucleotide and protein sequence information disclosed in the PCT Patent Publication WO 97/01571 and tested using the assays described herein for testing Delta3 therapeutics.

[0819] Compounds identified as increasing or decreasing Delta3 gene expression or protein activity can be administered to a subject at therapeutically effective dose to treat or ameliorate cardiovascular disease. A therapeutically effective dose refers to that amount of the compound sufficient to result in amelioration of symptoms associated with the particular disease.

### Pharmaceutical Compositions

[0820] The Delta3, FTHMA-070, Tango85, Tango77, SPOIL, NEOKINE, Tango129 or A259 nucleic acid molecules, Delta3, FTHMA-070, Tango85, Tango77, SPOIL, NEOKINE, Tango129 or A259 proteins, and anti-Delta3, FTHMA-070, Tango85, Tango77, SPOIL, NEOKINE, Tango129 or A259 antibodies (also referred to herein as “active compounds”) of the invention can be incorporated into pharmaceutical compositions suitable for administration. Such compositions typically comprise the nucleic acid molecule, protein, or antibody and a pharmaceutically acceptable carrier. As used herein the language “pharmaceutically acceptable carrier” is intended to include any and all solvents, dispersion media, coatings, antibacterial and antifungal agents, isotonic and absorption delaying agents, and the like, compatible with pharmaceutical administration. The use of such media and agents for pharmaceutically active substances is well known in the art. Except insofar as any conventional media or agent is incompatible with the active compound, use thereof in the compositions is contemplated. Supplementary active compounds can also be incorporated into the compositions.

[0821] The invention includes methods for preparing pharmaceutical compositions for modulating the expression or activity of a polypeptide or nucleic acid of the invention. Such methods comprise formulating a pharmaceutically acceptable carrier with an agent which modulates expression or activity of a polypeptide or nucleic acid of the invention. Such compositions can further include additional active agents. Thus, the invention further includes methods for preparing a pharmaceutical composition by formulating a pharmaceutically acceptable carrier with an agent which modulates expression or activity of a polypeptide or nucleic acid of the invention and one or more additional active compounds.

[0822] A pharmaceutical composition of the invention is formulated to be compatible with its intended route of administration. Examples of routes of administration include parenteral, e.g., intravenous, intradermal, subcutaneous, oral (e.g., inhalation), transdermal (topical), transmucosal, intramuscular and rectal administration. Solutions or suspensions used for parenteral, intradermal, or subcutaneous application can include the following components: a sterile diluent such as water for injection, saline solution, fixed oils, polyethylene glycols, glycerine, propylene glycol or other synthetic solvents; antibacterial agents such as benzyl alcohol or methyl parabens; antioxidants such as ascorbic acid or sodium bisulfite; chelating agents such as ethylenediaminetetraacetic acid; buffers such as acetates, citrates or phosphates and agents for the adjustment of tonicity such as sodium chloride or dextrose. pH can be adjusted with acids or bases, such as hydrochloric acid or sodium hydroxide. The parenteral preparation can be enclosed in ampoules, disposable syringes or multiple dose vials made of glass or plastic.

[0823] Pharmaceutical compositions suitable for injectable use include sterile aqueous solutions (where water soluble) or dispersions and sterile powders for the extemporaneous preparation of sterile injectable solutions or dispersions. For intravenous administration, suitable carriers include physiological saline, bacteriostatic water, Cremophor EL (BASF; Parsippany, N.J.) or phosphate buffered saline (PBS). In all'cases, the composition must be sterile and should be fluid to the extent that easy syringability exists. It must be stable under the conditions of manufacture and storage and must be preserved against the contaminating action of microorganisms such as bacteria and fungi. The carrier can be a solvent or dispersion medium containing, for example, water, ethanol, polyol (for example, glycerol, propylene glycol, and liquid polyetheylene glycol, and the like), and suitable mixtures thereof. The proper fluidity can be maintained, for example, by the use of a coating such as lecithin, by the maintenance of the required particle size in the case of dispersion and by the use of surfactants. Prevention of the action of microorganisms can be achieved by various antibacterial and antifungal agents, for example, parabens, chlorobutanol, phenol, ascorbic acid, thimerosal, and the like. In many cases, it will be preferable to include isotonic agents, for example, sugars, polyalcohols such as mannitol, sorbitol, sodium chloride in the composition. Prolonged absorption of the injectable compositions can be brought about by including in the composition an agent which delays absorption, for example, aluminum monostearate and gelatin.

[0824] Sterile injectable solutions can be prepared by incorporating the active compound (e.g., a Delta3, FTHMA-070, Tango85, Tango77, SPOIL, NEOKINE, Tango129 or A259 protein or anti-Delta3, FTHMA-070, Tango85, Tango77, SPOIL, NEOKINE, Tango129 or A259 antibody) in the required amount in an appropriate solvent with one or a combination of ingredients enumerated above, as required, followed by filtered sterilization. Generally, dispersions are prepared by incorporating the active compound into a sterile vehicle which contains a basic dispersion medium and the required other ingredients from those enumerated above. In the case of sterile powders for the preparation of sterile injectable solutions, the preferred methods of preparation are vacuum drying and freeze-drying which yields a powder of the active ingredient plus any additional desired ingredient from a previously sterile-filtered solution thereof.

[0825] Oral compositions generally include an inert diluent or an edible carrier. They can be enclosed in gelatin capsules or compressed into tablets. For the purpose of oral therapeutic administration, the active compound can be incorporated with excipients and used in the form of tablets, troches, or capsules. Oral compositions can also be prepared using a fluid carrier for use as a mouthwash, wherein the compound in the fluid carrier is applied orally and swished and expectorated or swallowed.

[0826] Pharmaceutically compatible binding agents, and/or adjuvant materials can be included as part of the composition. The tablets, pills, capsules, troches and the like can contain any of the following ingredients, or compounds of a similar nature: a binder such as microcrystalline cellulose, gum tragacanth or gelatin; an excipient such as starch or lactose, a disintegrating agent such as alginic acid, Primogel, or corn starch; a lubricant such as magnesium stearate or Sterotes; a glidant such as colloidal silicon dioxide; a sweetening agent such as sucrose or saccharin; or a flavoring agent such as peppermint, methyl salicylate, or orange flavoring.

[0827] For administration by inhalation, the compounds are delivered in the form of an aerosol spray from a pressurized container or dispenser which contains a suitable propellant, e.g., a gas such as carbon dioxide, or a nebulizer.

[0828] Systemic administration can also be by transmucosal or transdermal means. For transmucosal or transdermal administration, penetrants appropriate to the barrier to be permeated are used in the formulation. Such penetrants are generally known in the art, and include, for example, for transmucosal administration, detergents, bile salts, and fusidic acid derivatives. Transmucosal administration can be accomplished through the use of nasal sprays or suppositories. For transdermal administration, the active compounds are formulated into ointments, salves, gels, or creams as generally known in the art.

[0829] The compounds can also be prepared in the form of suppositories (e.g., with conventional suppository bases such as cocoa butter and other glycerides) or retention enemas for rectal delivery.

[0830] In one embodiment, the active compounds are prepared with carriers that will protect the compound against rapid elimination from the body, such as a controlled release formulation, including implants and microencapsulated delivery systems. Biodegradable, biocompatible polymers can be used, such as ethylene vinyl acetate, polyanhydrides, polyglycolic acid, collagen, polyorthoesters, and polylactic acid. Methods for preparation of such formulations will be apparent to those skilled in the art. The materials can also be obtained commercially from Alza Corporation and Nova Pharmaceuticals, Inc. Liposomal suspensions (including liposomes targeted to infected cells with monoclonal antibodies to viral antigens) can also be used as pharmaceutically acceptable carriers. These can be prepared according to methods known to those skilled in the art, for example, as described in U.S. Pat. No. 4,522,811.

[0831] It is especially advantageous to formulate oral or parenteral compositions in dosage unit form for ease of administration and uniformity of dosage. Dosage unit form as used herein refers to physically discrete units suited as unitary dosages for the subject to be treated; each unit containing a predetermined quantity of active compound calculated to produce the desired therapeutic effect in association with the required pharmaceutical carrier. The specification for the dosage unit forms of the invention are dictated by and directly dependent on the unique characteristics of the active compound and the particular therapeutic effect to be achieved, and the limitations inherent in the art of compounding such an active compound for the treatment of individuals.

[0832] For antibodies, the preferred dosage is 0.1 mg/kg to 100 mg/kg of body weight (generally 10 mg/kg to 20 mg/kg). If the antibody is to act in the brain, a dosage of 50 mg/kg to 100 mg/kg is usually appropriate. Generally, partially human antibodies and fully human antibodies have a longer half-life within the human body than other antibodies. Accordingly, lower dosages and less frequent administration is often possible. Modifications such as lipidation can be used to stabilize antibodies and to enhance uptake and tissue penetration (e.g., into the brain). A method for lipidation of antibodies is described by Cruikshank et al. ((1997) J. Acquired Immune Deficiency Syndromes and Human Retrovirology 14:193).

[0833] As defined herein, a therapeutically effective amount of protein or polypeptide (i.e., an effective dosage) ranges from about 0.001 to 30 mg/kg body weight, preferably about 0.01 to 25 mg/kg body weight, more preferably about 0.1 to 20 mg/kg body weight, and even more preferably about 1 to 10 mg/kg, 2 to 9 mg/kg, 3 to 8 mg/kg, 4 to 7 mg/kg, or 5 to 6 mg/kg body weight.

[0834] With regard to antibodies which are to act in the brain, a dosage of 50 mg/kg to 100 mg/kg is typically appropriate. Generally, partially human antibodies and fully human antibodies have a longer half-life within the human body than other antibodies. Accordingly, lower dosages and less frequent administration is often possible. Modifications such as lipidation can be used to stabilize antibodies and to enhance uptake and tissue penetration (e.g., into the brain). A method for lipidation of antibodies is described by Cruikshank et al. ((1997) J. Acquired Immune Deficiency Syndromes and Human Retrovirology 14:193).

[0835] Toxicity and therapeutic efficacy of such compounds can be determined by standard pharmaceutical procedures in cell cultures or experimental animals, e.g., for determining the LD50 (the dose lethal to 50% of the population) and the ED50 (the dose therapeutically effective in 50% of the population). The dose ratio between toxic and therapeutic effects is the therapeutic index and it can be expressed as the ratio LD50/ED50. Compounds which exhibit large therapeutic indices are preferred. While compounds that exhibit toxic side effects may be used, care should be taken to design a delivery system that targets such compounds to the site of affected tissue in order to minimize potential damage to uninfected cells and, thereby, reduce side effects.

[0836] The data obtained from the cell culture assays and animal studies can be used in formulating a range of dosage for use in humans. The dosage of such compounds lies preferably within a range of circulating concentrations that include the ED50 with little or no toxicity. The dosage may vary within this range depending upon the dosage form employed and the route of administration utilized. For any compound used in the method of the invention, the therapeutically effective dose can be estimated initially from cell culture assays. A dose may be formulated in animal models to achieve a circulating plasma concentration range that includes the IC50 (i.e., the concentration of the test compound which achieves a half-maximal inhibition of symptoms) as determined in cell culture. Such information can be used to more accurately determine useful doses in humans. Levels in plasma may be measured, for example, by high performance liquid chromatography.

[0837] The skilled artisan will appreciate that certain factors may influence the dosage required to effectively treat a subject, including but not limited to the severity of the disease or disorder, previous treatments, the general health and/or age of the subject, and other diseases present. Moreover, treatment of a subject with a therapeutically effective amount of a protein, polypeptide, or antibody can include a single treatment or, preferably, can include a series of treatments. In one embodiment, a subject is treated with a protein, or polypeptide in the range of between about 0.1 to 20 mg/kg body weight, one time per week for between about 1 to 10 weeks, preferably between about 2 to 8 weeks, more preferably between about 3 to 8 weeks, and even more preferably for about 4, 5, or 6 weeks. It will also be appreciated that the effective dosage of antibody, protein, or polypeptide used for treatment may increase or decrease over the course of a particular treatment. Changes in dosage may result and become apparent from the results of diagnostic assays as described herein.

[0838] The nucleic acid molecules of the invention can be inserted into vectors and used as gene therapy vectors. Gene therapy vectors can be delivered to a subject by, for example, intravenous injection, local administration (U.S. Pat. No. 5,328,470) or by stereotactic injection (see, e.g., Chen et al. (1994) Proc. Natl. Acad. Sci. USA 91:3054-3057). The pharmaceutical preparation of the gene therapy vector can include the gene therapy vector in an acceptable diluent, or can comprise a slow release matrix in which the gene delivery vehicle is imbedded. Alternatively, where the complete gene delivery vector can be produced intact from recombinant cells, e.g. retroviral vectors, the pharmaceutical preparation can include one or more cells which produce the gene delivery system.

[0839] The pharmaceutical compositions can be included in a container, pack, or dispenser together with instructions for administration.

[0840] In clinical settings, the gene delivery systems for the therapeutic Delta3 gene can be introduced into a patient by any of a number of methods, each of which is familiar in the art. For instance, a pharmaceutical preparation of the gene delivery system can be introduced systemically, e.g., by intravenous injection, and specific transduction of the protein in the target cells occurs predominantly from specificity of transfection provided by the gene delivery vehicle, cell-type or tissue-type expression due to the transcriptional regulatory sequences controlling expression of the receptor gene, or a combination thereof. In other embodiments, initial delivery of the recombinant gene is more limited with introduction into the animal being quite localized. For example, the gene delivery vehicle can be introduced by catheter (see U.S. Pat. No. 5,328,470) or by stereotactic injection (e.g., Chen et al. (1994) Proc. Natl. Acad. Sci. USA 91: 3054-3057). A Delta3 gene, such as any one of the sequences represented in the group consisting of SEQ ID NOs: 1, 3, 24, 26, 27, 29, 31, 33, 35, 37, 39, 41, 43 or 45, or a sequence homologous thereto can be delivered in a gene therapy construct by electroporation using techniques described, for example, by Dev et al. ((1994) Cancer Treat. Rev. 20:105-115).

[0841] The pharmaceutical preparation of the gene therapy construct can consist essentially of the gene delivery system in an acceptable diluent, or can comprise a slow release matrix in which the gene delivery vehicle is imbedded. Alternatively, where the complete gene delivery system can be produced intact from recombinant cells, e.g., retroviral vectors, the pharmaceutical preparation can comprise one or more cells which produce the gene delivery system.

[0842] The compositions may, if desired, be presented in a pack or dispenser device which may contain one or more unit dosage forms containing the active ingredient. The pack may for example comprise metal or plastic foil, such as a blister pack. The pack or dispenser device may be accompanied by instructions for administration.

### Uses and Methods of the Invention

[0843] The nucleic acid molecules, proteins, protein homologues, and antibodies described herein can be used in one or more of the following methods: a) screening assays; b) detection assays (e.g., chromosomal mapping, tissue typing, forensic biology), c) predictive medicine (e.g., diagnostic assays, prognostic assays, monitoring clinical trials, and pharmacogenomics); and d) methods of treatment (e.g., therapeutic and prophylactic). The isolated nucleic acid molecules of the invention can be used to express FTHMA-070, Tango85, Tango77 or A259 protein (e.g., via a recombinant expression vector in a host cell in gene therapy applications), to detect FTHMA-070, Tango85, Tango77 or A259 mRNA (e.g., in a biological sample) or a genetic lesion in a FTHMA-070, Tango85, Tango77 or A259 gene, and to modulate FTHMA-070, Tango85, Tango77 or A259 activity. In addition, the FTHMA-070, Tango85, Tango77 or A259 proteins can be used to screen drugs or compounds which modulate the FTHMA-070, Tango85, Tango77 or A259 activity or expression as well as to treat disorders characterized by insufficient or excessive production of FTHMA-070, Tango85, Tango77 or A259 protein or production of FTHMA-070, Tango85, Tango77 or A259 protein forms which have decreased or aberrant activity compared to FTHMA-070, Tango85, Tango77 or A259 wild type protein. In addition, the anti-FTHMA-070, Tango85, Tango77 or A259 antibodies of the invention can be used to detect and isolate FTHMA-070, Tango85, Tango77 or A259 proteins and modulate FTHMA-070, Tango85, Tango77 or A259 activity.

[0844] The nucleic acid molecules, proteins, protein homologues, and antibodies described herein can be used in one or more of the following methods: a) screening assays; b) detection assays (e.g., chromosomal mapping, tissue typing, forensic biology), c) predictive medicine (e.g., diagnostic assays, prognostic assays, monitoring clinical trials); and d) methods of treatment (e.g., therapeutic and prophylactic methods as well as such methods in the context of pharmacogenomics). As described herein, a SPOIL protein of the invention has one or more of the following activities: (i) interaction of a SPOIL protein in the extracellular milieu with a protein molecule on the surface of the same cell which secreted the SPOIL protein molecule (e.g., a SPOIL receptor or IL-1 receptor); (ii) interaction of a SPOIL protein in the extracellular milieu with a protein molecule on the surface of a different cell from that which secreted the SPOIL protein molecule (e.g., a SPOIL receptor or IL-1 receptor); (iii) complex formation between a SPOIL protein and a cell-surface receptor; (iv) interaction of a SPOIL protein with a target molecule in the extracellular milieu, and (v) interaction of the SPOIL protein with a target molecule in the cytoplasm of a cell, and can thus be used in, for example (1) regulating a signal transduction pathway (e.g., an IL-1-dependent or SPOIL-dependent pathway; (2) modulating cytokine production and/or secretion; (3) modulating lymphokine production and/or secretion; (4) modulating production of adhesion molecules; (5) modulation of nuclear transcription factors; (6) modulating secretion of IL-1; (7) competing with IL-1 to bind an IL-1 receptor; (8) modulating a proinflammatory cytokine; (9) modulating cell proliferation, development or differentiation (e.g., IL-1-stimulated or SPOIL stimulated); (10) modulating bone metabolism (e.g., bone formation and reabsorption); and (11) mediating cellular “acute phase” response. The isolated nucleic acid molecules of the invention can be used, for example, to express SPOIL protein (e.g., via a recombinant expression vector in a host cell in gene therapy applications), to detect SPOIL mRNA (e.g., in a biological sample) or a genetic alteration in an SPOIL gene, and to modulate IL-1 activity, as described further below. In addition, the SPOIL proteins can be screened which modulate the SPOIL activity as well as to treat disorders characterized by insufficient or excessive production of IL-1 which have decreased or aberrant activity compared to normal IL-1 expression (e.g., inflammatory diseases, e.g., rheumatoid arthritis, sepsis, stroke or diabetes, or stimulated differentiative or developmental disorders such as bone metabolism disorders, e.g., osteoporosis, Paget's disease of bone, hypercalcemia of malignancy or osteolytic metastases, or diseases that involve the bowel and are characterized by the production of inflammation and/or ulceration in the small or large bowel including, e.g., inflammatory bowl disease (IBD), Crohn's disease, irritable bowel syndrome (IBS) and ulcerative colitis. Soluble forms of the SPOIL protein can be used to bind IL-1 receptors and influence bioavailability of such a receptors cognate ligand. In addition, the anti-SPOIL antibodies of the invention can be used to detect and isolate SPOIL proteins.

[0845] The nucleic acid molecules, proteins, protein homologues, and antibodies described herein can be used in one or more of the following methods: a) screening assays; b) predictive medicine (e.g., diagnostic assays, prognostic assays, monitoring clinical trials, and pharmacogenetics); and c) methods of treatment (e.g., therapeutic and prophylactic). As described herein, a NEOKINE protein of the invention has one or more of the following activities: (i) interaction of a NEOKINE protein with a membrane-bound NEOKINE receptor; (ii) interaction of a NEOKINE protein with a membrane-bound chemokine receptor; (iii) indirect interaction of a NEOKINE protein with an intracellular protein via a membrane-bound NEOKINE receptor; (iv) indirect interaction of a NEOKINE protein with an intracellular protein via a membrane-bound chemokine receptor; (v) complex formation between a soluble NEOKINE protein and a NEOKINE binding partner; (vi) inhibition of the interaction of chemokines (e.g., pro-inflammatory chemokines) by binding to their cognate receptors; (vii) inhibition of the binding of HIV to HIV co-receptors; and (vii) inhibition of the binding of HIV to HIV co-receptors wherein said binding induces subsequent infection of susceptible cells and can thus be used in, for example, (1) modulation of cellular signal transduction, either in vitro or in vivo; (2) regulation of gene transcription in a cell expressing a NEOKINE receptor or a chemokine receptor; (3) regulation of gene transcription in a cell expressing a NEOKINE receptor or a chemokine receptor, wherein said cell is involved in angiogenesis or inflammation; (4) regulation of angiogenesis; (5) regulation of angiogenesis, wherein said regulation comprises inhibibition of angiogenesis; (6) regulation of angiogenesis, wherein said regulation comprises maintenance of angiostasis; (7) regulation of inflammation; and (8) regulation of inflammation, wherein said regulation comprises inhibition of chemoattraction (e.g., neutrophil chemoattraction), inhibition of inflammation, inhibition of inflammation by blocking the action of pro-inflammatory chemokines by binding to their cognate receptors, inhibition of psoriasis, suppression of immune rejection following skin graft, suppression of immune rejection following kidney transplant, inhibition of kidney inflammation in acute renal failure, inhibition of brain inflammation following stroke or ischaemia, or inhibition of brain inflammation following viral infection. The isolated nucleic acid molecules of the invention can be used, for example, to express NEOKINE protein (e.g., via a recombinant expression vector in a host cell in gene therapy applications), to detect NEOKINE mRNA (e.g., in a biological sample) or a genetic alteration in a NEOKINE gene, and to modulate NEOKINE activity, as described further below. The NEOKINE proteins can be used to treat disorders characterized by insufficient or excessive production of a non-NEOKINE chemokine or production of chemokine forms which have decreased or aberrant activity compared to wild type chemokines. In addition, the NEOKINE proteins can be used to screen drugs or compounds which modulate the NEOKINE activity as well as to treat disorders characterized by insufficient or excessive production of NEOKINE protein or production of NEOKINE protein forms which have decreased or aberrant activity compared to NEOKINE wild type protein. Moreover, the anti-NEOKINE antibodies of the invention can be used to detect and isolate NEOKINE proteins, regulate the bioavailability of NEOKINE proteins, and modulate NEOKINE activity.

[0846] The nucleic acid molecules, proteins, protein homologues, and antibodies described herein can be used in one or more of the following methods: a) screening assays; b) detection assays (e.g., chromosomal mapping, tissue typing, forensic biology), c) predictive medicine (e.g., diagnostic assays, prognostic assays, monitoring clinical trials, and pharmacogenomics); and d) methods of treatment (e.g., therapeutic and prophylactic). A T129 protein interacts with other cellular proteins and can thus be used for (i) regulation of cellular proliferation; (ii) regulation of cellular differentiation; and (iii) regulation of cell survival. The isolated nucleic acid molecules of the invention can be used to express T129 protein (e.g., via a recombinant expression vector in a host cell in gene therapy applications), to detect T129 mRNA (e.g., in a biological sample) or a genetic lesion in a T129 gene, and to modulate T129 activity. In addition, the T129 proteins can be used to screen drugs or compounds which modulate the T129 activity or expression as well as to treat disorders characterized by insufficient or excessive production of T129 protein or production of T129 protein forms which have decreased or aberrant activity compared to T129 wild type protein. In addition, the anti-T129 antibodies of the invention can be used to detect and isolate T129 proteins and modulate T129 activity.

[0847] This invention further pertains to novel agents identified by the above-described screening assays and uses thereof for treatments as described herein.

### FTHMA-070. T85, T129 or A259 Screening Assays

[0848] The invention provides a method (also referred to herein as a “screening assay”) for identifying modulators, i.e., candidate or test compounds or agents (e.g., peptides, peptidomimetics, small molecules or other drugs) which bind to FTHMA-070, T85, T129 or A259 proteins or have a stimulatory or inhibitory effect on, for example, FTHMA-070, T85, T129 or A259 expression or FTHMA-070, T85, T129 or A259 activity.

[0849] In one embodiment, the invention provides assays for screening candidate or test compounds which bind to or modulate the activity of the membrane-bound form of a FTHMA-070, T85, T129 or A259 protein or polypeptide or biologically active portion thereof. The test compounds of the present invention can be obtained using any of the numerous approaches in combinatorial library methods known in the art, including: biological libraries; spatially addressable parallel solid phase or solution phase libraries; synthetic library methods requiring deconvolution; the ‘one-bead one-compound’ library method; and synthetic library methods using affinity chromatography selection. The biological library approach is limited to peptide libraries, while the other four approaches are applicable to peptide, non-peptide oligomer or small molecule libraries of compounds (Lam, (1997) Anticancer Drug Des. 12:145).

[0850] Examples of methods for the synthesis of molecular libraries can be found in the art, for example in: DeWitt et al. (1993) Proc. Natl. Acad. Sci. U.S.A. 90:6909; Erb et al. (1994) Proc. Natl. Acad. Sci. USA 91:11422; Zuckermann et al. (1994). J. Med. Chem. 37:2678; Cho et al. (1993) Science 261:1303; Carrell et al. (1994) Angew. Chem. Int. Ed. Engl. 33:2059; Carell et al. (1994) Angew. Chem. Int. Ed. Engl. 33:2061; and Gallop et al. (1994) J. Med. Chem. 37:1233. Libraries of compounds may be presented in solution (e.g., Houghten (1992) Bio/Techniques 13:412-421), or on beads (Lam (1991) Nature 354:82-84), chips (Fodor (1993) Nature 364:555-556), bacteria (U.S. Pat. No. 5,223,409), spores (U.S. Pat. Nos. 5,571,698; 5,403,484; and 5,223,409), plasmids (Cull et al. (1992) Proc. Natl. Acad. Sci. USA 89:1865-1869) or on phage (Scott and Smith (1990) Science 249:386-390; Devlin (1990) Science 249:404-406; Cwirla et al. (1990) Proc. Natl. Acad. Sci. 87:6378-6382; and Felici (1991) J. Mol. Biol. 222:301-310).

[0851] In one embodiment, an assay is a cell-based assay in which a cell which expresses a membrane-bound form of FTHMA-070, T85, T129 or A259 protein, or a biologically active portion thereof, on the cell surface is contacted with a test compound and the ability of the test compound to bind to a FTHMA-070, T85, T129 or A259 protein determined. The cell, for example, can be a yeast cell or a cell of mammalian origin. Determining the ability of the test compound to bind to the FTHMA-070, T85, T129 or A259 protein can be accomplished, for example, by coupling the test compound with a radioisotope or enzymatic label such that binding of the test compound to the FTHMA-070, T85, T129 or A259 protein or biologically active portion thereof can be determined by detecting the labeled compound in a complex. For example, test compounds can be labeled with ¹²⁵I, ³⁵S, ¹⁴C, or ³H, either directly or indirectly, and the radioisotope detected by direct counting of radioemmission or by scintillation counting. Alternatively, test compounds can be enzymatically labeled with, for example, horseradish peroxidase, alkaline phosphatase, or luciferase, and the enzymatic label detected by determination of conversion of an appropriate substrate to product. In a preferred embodiment, the assay comprises contacting a cell which expresses a membrane-bound form of FTHMA-070, T85, T129 or A259 protein, or a biologically active portion thereof, on the cell surface with a known compound which binds FTHMA-070, T85, T129 or A259 to form an assay mixture, contacting the assay mixture with a test compound, and determining the ability of the test compound to interact with a FTHMA-070, T85, T129 or A259 protein, wherein determining the ability of the test compound to interact with a FTHMA-070, T85, T129 or A259 protein comprises determining the ability of the test compound to preferentially bind to FTHMA-070, T85, T129 or A259 or a biologically active portion thereof as compared to the known compound.

[0852] In another embodiment, an assay is a cell-based assay comprising contacting a cell expressing a membrane-bound form of FTHMA-070, T85, T129 or A259 protein, or a biologically active portion thereof, on the cell surface with a test compound and determining the ability of the test compound to modulate (e.g., stimulate or inhibit) the activity of the FTHMA-070, T85, T129 or A259 protein or biologically active portion thereof. Determining the ability of the test compound to modulate the activity of FTHMA-070, T85, T129 or A259 or a biologically active portion thereof can be accomplished, for example, by determining the ability of the FTHMA-070, T85, T129 or A259 protein to bind to or interact with a FTHMA-070, T85, T129 or A259 target molecule. As used herein, a “target molecule” is a molecule with which a FTHMA-070, T85, T129 or A259 protein binds or interacts in nature, for example, a molecule on the surface of a cell which expresses a FTHMA-070, T85, T129 or A259 protein, a molecule on the surface of a second cell, a molecule in the extracellular milieu, a molecule associated with the internal surface of a cell membrane or a cytoplasmic molecule. A FTHMA-070, T85, T129 or A259 target molecule can be a non-FTHMA-070, T85, T129 or A259 molecule or a FTHMA-070, T85, T129 or A259 protein or polypeptide of the present invention. In one embodiment, a FTHMA-070, T85, T129 or A259 target molecule is a component of a signal transduction pathway which facilitates transduction of an extracellular signal (e.g., a signal generated by binding of a compound to a membrane-bound FTHMA-070, T85, T129 or A259 molecule) through the cell membrane and into the cell. The target, for example, can be a second intercellular protein which has catalytic activity or a protein which facilitates the association of downstream signaling molecules with FTHMA-070, T85, T129 or A259.

[0853] Determining the ability of the FTHMA-070, T85, T129 or A259 polypeptide of the invention to bind to or interact with a target molecule can be accomplished by one of the methods described above for determining direct binding. As used herein, a “target molecule” is a molecule with which a selected polypeptide (e.g., a polypeptide of the invention) binds or interacts with in nature, for example, a molecule on the surface of a cell which expresses the selected protein, a molecule on the surface of a second cell, a molecule in the extracellular milieu, a molecule associated with the internal surface of a cell membrane or a cytoplasmic molecule. A target molecule can be a FTHMA-070, T85, T129 or A259 polypeptide of the invention or some other polypeptide or protein. For example, a target molecule can be a component of a signal transduction pathway which facilitates transduction of an extracellular signal (e.g., a signal generated by binding of a compound to a polypeptide of the invention) through the cell membrane and into the cell or a second intercellular protein which has catalytic activity or a protein which facilitates the association of downstream signaling molecules with a polypeptide of the invention. Determining the ability of a FTHMA-070, T85, T129 or A259 polypeptide of the invention to bind to or interact with a target molecule can be accomplished by determining the activity of the target molecule. For example, the activity of the target molecule can be determined by detecting induction of a cellular second messenger of the target (e.g., intracellular Ca²⁺, diacylglycerol, IP3, etc.), detecting catalytic/enzymatic activity of the target on an appropriate substrate, detecting the induction of a reporter gene (e.g., a regulatory element that is responsive to a polypeptide of the invention operably linked to a nucleic acid encoding a detectable marker, e.g., luciferase), or detecting a cellular response, for example, cellular differentiation, or cell proliferation.

[0854] In yet another embodiment, an assay of the present invention is a cell-free assay comprising contacting a FTHMA-070, T85, T129 or A259 protein or biologically active portion thereof with a test compound and determining the ability of the test compound to bind to the FTHMA-070, T85, T129 or A259 protein or biologically active portion thereof. Binding of the test compound to the FTHMA-070, T85, T129 or A259 protein can be determined either directly or indirectly as described above. In a preferred embodiment, the assay includes contacting the FTHMA-070, T85, T129 or A259 protein or biologically active portion thereof with a known compound which binds FTHMA-070, T85, T129 or A259 to form an assay mixture, contacting the assay mixture with a test compound, and determining the ability of the test compound to interact with a FTHMA-070, T85, T129 or A259 protein, wherein determining the ability of the test compound to interact with a FTHMA-070, T85, T129 or A259 protein comprises determining the ability of the test compound to preferentially bind to FTHMA-070, T85, T129 or A259 or biologically active portion thereof as compared to the known compound.

[0855] In another embodiment, an assay is a cell-free assay comprising contacting FTHMA-070, T85, T129 or A259 protein or biologically active portion thereof with a test compound and determining the ability of the test compound to modulate (e.g., stimulate or inhibit) the activity of the FTHMA-070, T85, T129 or A259 protein or biologically active portion thereof. Determining the ability of the test compound to modulate the activity of FTHMA-070, T85, T129 or A259 can be accomplished, for example, by determining the ability of the FTHMA-070, T85, T129 or A259 protein to bind to a FTHMA-070, T85, T129 or A259 target molecule by one of the methods described above for determining direct binding. In an alternative embodiment, determining the ability of the test compound to modulate the activity of FTHMA-070, T85, T129 or A259 can be accomplished by determining the ability of the FTHMA-070, T85, T129 or A259 protein further modulate a FTHMA-070, T85, T129 or A259 target molecule. For example, the catalytic/enzymatic activity of the target molecule on an appropriate substrate can be determined as previously described.

[0856] In yet another embodiment, the cell-free assay comprises contacting the FTHMA-070, T85, T129 or A259 protein or biologically active portion thereof with a known compound which binds FTHMA-070, T85, T129 or A259 to form an assay mixture, contacting the assay mixture with a test compound, and determining the ability of the test compound to interact with a FTHMA-070, T85, T129 or A259 protein, wherein determining the ability of the test compound to interact with a FTHMA-070, T85, T129 or A259 protein comprises determining the ability of the FTHMA-070, T85, T129 or A259 protein to preferentially bind to or modulate the activity of a FTHMA-070, T85, T129 or A259 target molecule.

[0857] In the case of cell-free assays, it may be desirable to utilize a solubilizing agent such that the membrane-bound form of FTHMA-070, T85, T129 or A259 is maintained in solution. Examples of such solubilizing agents include non-ionic detergents such as n-octylglucoside, n-dodecylglucoside, n-dodecylmaltoside, octanoyl-N-methylglucamide, decanoyl-N-methylglucamide, Triton® X-100, Triton® X-114, Thesit®, Isotridecypoly(ethylene glycol ether)n, 3-[(3-cholamidopropyl)dimethylamminio]-1-propane sulfonate (CHAPS), 3-[(3-cholamidopropyl)dimethylamminio]-2-hydroxy-1-propane sulfonate (CHAPSO), or N-dodecyl=N,N-dimethyl-3-ammonio-1-propane sulfonate.

[0858] In more than one embodiment of the above assay methods of the present invention, it may be desirable to immobilize either FTHMA-070, T85, T129 or A259 or its target molecule to facilitate separation of complexed from uncomplexed forms of one or both of the proteins, as well as to accommodate automation of the assay. Binding of a test compound to FTHMA-070, T85, T129 or A259, or interaction of FTHMA-070, T85, T129 or A259 with a target molecule in the presence and absence of a candidate compound, can be accomplished in any vessel suitable for containing the reactants. Examples of such vessels include microtitre plates, test tubes, and micro-centrifuge tubes. In one embodiment, a fusion protein can be provided which adds a domain that allows one or both of the proteins to be bound to a matrix. For example, glutathione-S-transferase/FTHMA-070, T85, T129 or A259 fusion proteins or glutathione-S-transferase/target fusion proteins can be adsorbed onto glutathione sepharose beads (Sigma Chemical; St. Louis, Mo.) or glutathione derivatized microtitre plates, which are then combined with the test compound or the test compound and either the non-adsorbed target protein or FTHMA-070, T85, T129 or A259 protein, and the mixture incubated under conditions conducive to complex formation (e.g., at physiological conditions for salt and pH). Following incubation, the beads or microtitre plate wells are washed to remove any unbound components, the matrix immobilized in the case of beads, complex determined either directly or indirectly, for example, as described above. Alternatively, the complexes can be dissociated from the matrix, and the level of FTHMA-070, T85, T129 or A259 binding or activity determined using standard techniques.

[0859] Other techniques for immobilizing proteins on matrices can also be used in the screening assays of the invention. For example, either FTHMA-070, T85, T129 or A259 or its target molecule can be immobilized utilizing conjugation of biotin and streptavidin. Biotinylated FTHMA-070, T85, T129 or A259 or target molecules can be prepared from biotin-NHS (N-hydroxy-succinimide) using techniques well known in the art (e.g., biotinylation kit, Pierce Chemicals; Rockford, Ill.), and immobilized in the wells of streptavidin-coated 96 well plates (Pierce Chemical). Alternatively, antibodies reactive with. FTHMA-070, T85, T129 or A259 or target molecules but which do not interfere with binding of the FTHMA-070, T85, T129 or A259 protein to its target molecule can be derivatized to the wells of the plate, and unbound target or FTHMA-070, T85, T129 or A259 trapped in the wells by antibody conjugation. Methods for detecting such complexes, in addition to those described above for the GST-immobilized complexes, include immunodetection of complexes using antibodies reactive with the FTHMA-070, T85, T129 or A259 or target molecule, as well as enzyme-linked assays which rely on detecting an enzymatic activity associated with the FTHMA-070, T85, T129 or A259 or target molecule.

[0860] In another embodiment, modulators of FTHMA-070, T85, T129 or A259 expression are identified in a method in which a cell is contacted with a candidate compound and the expression of FTHMA-070, T85, T129 or A259 mRNA or protein in the cell is determined. The level of expression of FTHMA-070, T85, T129 or A259 mRNA or protein in the presence of the candidate compound is compared to the level of expression of FTHMA-070, T85, T129 or A259 mRNA or protein in the absence of the candidate compound. The candidate compound can then be identified as a modulator of FTHMA-070, T85, T129 or A259 expression based on this comparison. For example, when expression of FTHMA-070, T85, T129 or A259 mRNA or protein is greater (statistically significantly greater) in the presence of the candidate compound than in its absence, the candidate compound is identified as a stimulator of FTHMA-070, T85, T129 or A259 mRNA or protein expression. Alternatively, when expression of FTHMA-070, T85, T129 or A259 mRNA or protein is less (statistically significantly less) in the presence of the candidate compound than in its absence, the candidate compound is identified as an inhibitor of FTHMA-070, T85, T129 or A259 mRNA or protein expression. The level of FTHMA-070, T85, T129 or A259 mRNA or protein expression in the cells can be determined by methods described herein for detecting FTHMA-070, T85, T129 or A259 mRNA or protein.

[0861] In yet another aspect of the invention, the FTHMA-070, T85, T129 or A259 proteins can be used as “bait proteins” in a two-hybrid assay or three hybrid assay (see, e.g., U.S. Pat. No. 5,283,317; Zervos et al. (1993) Cell 72:223-232; Madura et al. (1993) J. Biol. Chem. 268:12046-12054; Bartel et al. (1993) Bio/Techniques 14:920-924; Iwabuchi et al. (1993) Oncogene 8:1693-1696; and WO94/10300), to identify other proteins, which bind to or interact with FTHMA-070, T85, T129 or A259 and modulate FTHMA-070, T85, T129 or A259 activity. Such FTHMA-070, T85, T129 or A259-binding proteins are also likely to be involved in the propagation of signals by the FTHMA-070, T85, T129 or A259 proteins as, for example, upstream or downstream elements of the FTHMA-070, T85, T129 or A259 pathway.

[0862] The two-hybrid system is based on the modular nature of most transcription factors, which consist of separable DNA-binding and activation domains. Briefly, the assay utilizes two different DNA constructs. In one construct, the gene that codes for FTHMA-070, T85, T129 or A259 is fused to a gene encoding the DNA binding domain of a known transcription factor (e.g., GAL-4). In the other construct, a DNA sequence, from a library of DNA sequences, that encodes an unidentified protein (“prey” or “sample”) is fused to a gene that codes for the activation domain of the known transcription factor. If the “bait” and the “prey” proteins are able to interact, in vivo, forming an FTHMA-070, T85, T129 or A259-dependent complex, the DNA-binding and activation domains of the transcription factor are brought into close proximity. This proximity allows transcription of a reporter gene (e.g., LacZ) which is operably linked to a transcriptional regulatory site responsive to the transcription factor. Expression of the reporter gene can be detected and cell colonies containing the functional transcription factor can be isolated and used to obtain the cloned gene which encodes the protein which interacts with FTHMA-070, T85, T129 or A259.

[0863] This invention further pertains to novel agents identified by the above-described screening assays and uses thereof for treatments as described herein.

### Tango-77 Screening Assays

[0864] The invention provides a method (also referred to herein as a “screening assay”) for identifying modulators, i.e., candidate or test compounds or agents (e.g., peptides, peptidomimetics, small molecules or other drugs) which bind to Tango-77 proteins or have a stimulatory or inhibitory effect on, for example, Tango-77 expression or Tango-77 activity.

[0865] Examples of methods for the synthesis of molecular libraries can be found in the art, for example in: DeWitt et al. (1993) Proc. Natl. Acad. Sci. USA 90:6909; Erb et al. (1994) Proc. Natl. Acad. Sci. USA 91:11422; Zuckermann et al. (1994). J. Med. Chem. 37:2678; Cho et al. (1993) Science 261:1303; Carrell et al. (1994) Angew. Chem. Int. Ed. Engl. 33:2059; Carell et al. (1994) Angew. Chem. Int. Ed. Engl. 33:2061; and Gallop et al. (1994) J. Med. Chem. 37:1233.

[0866] Libraries of compounds may be presented in solution (e.g., Houghten (1992) Bio/Techniques 13:412-421), or on beads (Lam (1991) Nature 354:82-84), chips (Fodor (1993) Nature 364:555-556), bacteria (U.S. Pat. No. 5,223,409), spores (U.S. Pat. Nos. 5,571,698; 5,403,484; and 5,223,409), plasmids (Cull et al. (1992) Proc. Natl. Acad. Sci. USA 89:1865-1869) or phage (Scott and Smith (1990) Science 249:386-390; Devlin (1990) Science 249:404-406; Cwirla et al. (1990) Proc. Natl. Acad. Sci. USA 87:6378-6382; and Felici (1991) J. Mol. Biol. 222:301-310).

[0867] In another embodiment, an assay is used to determine the ability of the test compound to modulate the activity of Tango-77 or a biologically active portion thereof, for example, by determining the ability of the Tango-77 protein to bind to or interact with a Tango-77 target molecule. As used herein, a “target molecule” is a molecule with which a Tango-77 protein binds or interacts in nature, for example, a molecule on the surface of a cell. A Tango-77 target molecule can be a non-Tango-77 molecule or a Tango-77 protein or polypeptide of the present invention. In one embodiment, a Tango-77 target molecule is a component of a signal transduction pathway, for example, Tango-77 may bind to a IL-1 receptor or another receptor thereby blocking the receptor and inhibiting future signal transduction. Determining the ability of the Tango-77 protein to bind to or interact with a Tango-77 target molecule can be accomplished by one of the methods described above. In a preferred embodiment, determining the ability of the Tango-77 protein to bind to or interact with a Tango-77 target molecule can be accomplished by determining the activity of the target molecule. For example, the activity of the target molecule can be determined by detecting induction of a cellular second messenger of the target (e.g., intracellular Ca²⁺, diacylglycerol, IP3, etc.), detecting catalytic/enzymatic activity of the target on an appropriate substrate, detecting the induction of a reporter gene (e.g., a Tango-77-responsive regulatory element operably linked to a nucleic acid encoding a detectable marker, e.g. luciferase), or detecting a cellular response, for example, inflammation.

[0868] In yet another embodiment, an assay of the present invention is a cell-free assay comprising contacting a Tango-77 protein or biologically active portion thereof with a test compound and determining the ability of the test compound to bind to the Tango-77 protein or biologically active portion thereof. Binding of the test compound to the Tango-77 protein can be determined either directly or indirectly as described above. In a preferred embodiment, the assay includes contacting the Tango-77 protein or biologically active portion thereof with a known compound which binds Tango-77 to form an assay mixture, contacting the assay mixture with a test compound, and determining the ability of the test compound to interact with a Tango-77 protein, wherein determining the ability of the test compound to interact with a Tango-77 protein comprises determining the ability of the test compound to preferentially bind to Tango-77 or biologically active portion thereof as compared to the known compound.

[0869] In another embodiment, an assay is a cell-free assay comprising contacting Tango-77 protein or biologically active portion thereof with a test compound and determining the ability of the test compound to modulate (e.g., stimulate or inhibit) the activity of the Tango-77 protein or biologically active portion thereof. Determining the ability of the test compound to modulate the activity of Tango-77 can be accomplished, for example, by determining the ability of the Tango-77 protein to bind to a Tango-77 target molecule by one of the methods described above for determining direct binding. In an alternative embodiment, determining the ability of the test compound to modulate the activity of Tango-77 can be accomplished by determining the ability of the Tango-77 protein to further modulate a Tango-77 target molecule. For example, the catalytic/enzymatic activity of the target molecule on an appropriate substrate can be determined as previously described.

[0870] In yet another embodiment, the cell-free assay comprises contacting the Tango-77 protein or biologically active portion thereof with a known compound which binds Tango-77 to form an assay mixture, contacting the assay mixture with a test compound, and determining the ability of the test compound to interact with a Tango-77 protein, wherein determining the ability of the test compound to interact with a Tango-77 protein comprises determining the ability of the Tango-77 protein to preferentially bind to or modulate the activity of a Tango-77 target molecule.

[0871] It is possible that membrane-bound forms of Tango-77 exist. The cell-free assays of the present invention are amenable to use of both the forms Tango-77. In the case of cell-free assays comprising a membrane-bound form of Tango-77, it may be desirable to utilize a solubilizing agent such that the membrane-bound form of Tango-77 is maintained in solution. Examples of such solubilizing agents include non-ionic detergents such as n-octylglucoside, n-dodecylglucoside, n-dodecylmaltoside, octanoyl-N-methylglucamide, decanoyl-N-methylglucamide, Triton® X-100, Triton® X-114, Thesit®, Isotridecypoly(ethylene glycol ether)n, 3-[(3-cholamidopropyl)dimethylamminio]-1-propane sulfonate (CHAPS), 3-[(3-cholamidopropyl)dimethylamminio]-2-hydroxy-1-propane sulfonate (CHAPSO), or N-dodecyl=N,N-dimethyl-3-ammonio-1-propane sulfonate.

[0872] In more than one embodiment of the above assay methods of the present invention, it may be desirable to immobilize either Tango-77 or its target molecule to facilitate separation of complexed from uncomplexed forms of one or both of the proteins, as well as to accommodate automation of the assay. Binding of a test compound to Tango-77, or interaction of Tango-77 with a target molecule in the presence and absence of a candidate compound, can be accomplished in any vessel suitable for containing the reactants. Examples of such vessels include microtitre plates, test tubes, and micro-centrifuge tubes. In one embodiment, a fusion protein can be provided which adds a domain that allows one or both of the proteins to be bound to a matrix. For example, glutathione-S-transferase/Tango-77 fusion proteins or glutathione-S-transferase/target fusion proteins can be adsorbed onto glutathione sepharose beads (Sigma Chemical Co.; St. Louis, Mo.) or glutathione derivatized microtitre plates, which are then combined with the test compound or the test compound and either the non-adsorbed target protein or Tango-77 protein, and the mixture incubated under conditions conducive to complex formation (e.g., at physiological conditions for salt and pH). Following incubation, the beads or microtitre plate wells are washed to remove any unbound components and complex formation is measured either directly or indirectly, for example, as described above. Alternatively, the complexes can be dissociated from the matrix, and the level of Tango-77 binding or activity determined using standard techniques.

[0873] Other techniques for immobilizing proteins on matrices can also be used in the screening assays of the invention. For example, either Tango-77 or its target molecule can be immobilized utilizing conjugation of biotin and streptavidin. Biotinylated Tango-77 or target molecules can be prepared from biotin-NHS (N-hydroxy-succinimide) using techniques well known in the art (e.g., biotinylation kit, Pierce Chemicals; Rockford, Ill.), and immobilized in the wells of streptavidin-coated 96 well plates (Pierce Chemical). Alternatively, antibodies reactive with Tango-77 or target molecules but which do not interfere with binding of the Tango-77 protein to its target molecule can be derivatized to the wells of the plate, and unbound target or Tango-77 trapped in the wells by antibody conjugation. Methods for detecting such complexes, in addition to those described above for the GST-immobilized complexes, include immunodetection of complexes using antibodies reactive with the Tango-77 or target molecule, as well as enzyme-linked assays which rely on detecting an enzymatic activity associated with the Tango-77 or target molecule.

[0874] In another embodiment, modulators of Tango-77 expression are identified in a method in which a cell is contacted with a candidate compound and the expression of Tango-77 mRNA or protein in the cell is determined. The level of expression of Tango-77 mRNA or protein in the presence of the candidate compound is compared to the level of expression of Tango-77 mRNA or protein in the absence of the candidate compound. The candidate compound can then be identified as a modulator of Tango-77 expression based on this comparison. For example, when expression of Tango-77 mRNA or protein is greater (statistically significantly greater) in the presence of the candidate compound than in its absence, the candidate compound is identified as a stimulator of Tango-77 mRNA or protein expression. Alternatively, when expression of Tango-77 mRNA or protein is less (statistically significantly less) in the presence of the candidate compound than in its absence, the candidate compound is identified as an inhibitor of Tango-77 mRNA or protein expression. The level of Tango-77 mRNA or protein expression in the cells can be determined by methods described herein for detecting Tango-77 mRNA or protein.

[0875] In yet another aspect of the invention, the Tango-77 proteins can be used as “bait proteins” in a two-hybrid assay or three hybrid assay (see, e.g., U.S. Pat. No. 5,283,317; Zervos et al. (1993) Cell 72:223-232; Madura et al. (1993) J. Biol. Chem. 268:12046-12054; Bartel et al. (1993) Bio/Techniques 14:920-924; Iwabuchi et al. (1993) Oncogene 8:1693-1696; and PCT Publication No. WO 94/10300), to identify other proteins, which bind to or interact with Tango-77 (“Tango-77-binding proteins” or “Tango-77-bp”) and modulate Tango-77 activity. Such Tango-77-binding proteins are also likely to be involved in the propagation of signals by the Tango-77 proteins as, for example, upstream or downstream elements of the Tango-77 pathway.

[0876] The two-hybrid system is based on the modular nature of most transcription factors, which consist of separable DNA-binding and activation domains. Briefly, the assay utilizes two different DNA constructs. In one construct, the gene that codes for Tango-77 is fused to a gene encoding the DNA binding domain of a known transcription factor (e.g., GAL-4). In the other construct, a DNA sequence, from a library of DNA sequences, that encodes an unidentified protein (“prey” or “sample”) is fused to a gene that codes for the activation domain of the known transcription factor. If the “bait” and the “prey” proteins are able to interact, in vivo, forming an Tango-77-dependent complex, the DNA-binding and activation domains of the transcription factor are brought into close proximity. This proximity allows transcription of a reporter gene (e.g., LacZ) which is operably linked to a transcriptional regulatory site responsive to the transcription factor. Expression of the reporter gene can be detected and cell colonies containing the functional transcription factor can be isolated and used to obtain the cloned gene which encodes the protein which interacts with Tango-77.

[0877] This invention further pertains to novel agents identified by the above-described screening assays and uses thereof for treatments as described herein.

### SPOIL Screening Assays:

[0878] The invention provides a method (also referred to herein as a “screening assay”) for identifying modulators, i.e., candidate or test compounds or agents (e.g., peptides, peptidomimetics, small molecules or other drugs) which bind to SPOIL proteins or have a stimulatory or inhibitory effect on, for example, SPOIL expression or SPOIL activity and/or have a stimulatory or inhibitory effect on IL-1 stimulated activities.

[0879] In one embodiment, the invention provides assays for screening candidate or test compounds which bind to or modulate the activity of a SPOIL target molecule. The test compounds of the present invention can be obtained using any of the numerous approaches in combinatorial library methods known in the art, including: biological libraries; spatially addressable parallel solid phase or solution phase libraries; synthetic library methods requiring deconvolution; the ‘one-bead one-compound’ library method; and synthetic library methods using affinity chromatography selection. The biological library approach is limited to peptide libraries, while the other four approaches are applicable to peptide, non-peptide oligomer or small molecule libraries of compounds (Lam (1997) Anticancer Drug Des. 12:145).

[0880] Examples of methods for the synthesis of molecular libraries can be found in the art, for example in: DeWitt et al. (1993) Proc. Natl. Acad. Sci. U.S.A. 90:6909; Erb et al. (1994) Proc. Natl. Acad. Sci. USA 91:11422; Zuckermann et al. (1994). J. Med. Chem. 37:2678; Cho et al. (1993) Science 261:1303; Carrell et al. (1994) Angew. Chem. Mt. Ed. Engl. 33:2059; Carell et al. (1994) Angew. Chem. Mt. Ed. Engl. 33:2061; and in Gallop et al. (1994) J. Med. Chem. 37:1233. Libraries of compounds may be presented in solution (e.g., Houghten (1992) Biotechniques 13:412-421), or on beads (Lam (1991) Nature 354:82-84), chips (Fodor (1993) Nature 364:555-556), bacteria (Ladner U.S. Pat. No. 5,223,409), spores (Ladner U.S. Pat. No. '409), plasmids (Cull et al. (1992) Proc Natl Acad Sci USA 89:1865-1869) or on phage (Scott and Smith (1990) Science 249:386-390); (Devlin (1990) Science 249:404-406); (Cwirla et al. (1990) Proc. Natl. Acad. Sci. 87:6378-6382); (Felici (1991) J. Mol. Biol. 222:301-310); (Ladner supra.).

[0881] In one embodiment, the screening assay comprises contacting a cell which expresses a SPOIL receptor on the cell surface with a SPOIL protein or biologically-active portion thereof, to form an assay mixture, contacting the assay mixture with a test compound, and determining the ability of the test compound to interact with a SPOIL receptor, wherein determining the ability of the test compound to interact with a SPOIL receptor comprises determining the ability of the test compound to preferentially bind to the SPOIL receptor as compared to the ability of SPOIL, or a biologically active portion thereof, to bind to the receptor. In addition, the screening assay can also comprise contacting a cell which expresses a SPOIL receptor on the cell surface with a SPOIL protein or biological portion thereof, and IL-1, to form a competitive binding assay. The binding assay can then be contacted with a test compound in order to determine the ability of the test compound to preferentially bind to the receptor as compared with the SPOIL protein or biological portion thereof and/or modulate IL-1 stimulated activity by the cell.

[0882] In another embodiment, an assay is a cell-based assay comprising contacting a cell expressing a SPOIL target molecule with a test compound and determining the ability of the test compound to modulate (e.g. stimulate or inhibit) the activity of the SPOIL target molecule. Determining the ability of the test compound to modulate the activity of a SPOIL target molecule can be accomplished, for example, by determining the ability of the SPOIL protein to bind to or interact with the SPOIL target molecule in the presence of the test compound. This assay can be performed in the presence of IL-1, and the ability of the SPOIL protein to interact with the target molecule can be determined by assessing the activity of a cell that is normally stimulated by IL-1 as compared to a control assay comprising cell expressing a SPOIL target molecule, SPOIL protein and IL-1 without the test compound.

[0883] Determining the ability of the SPOIL protein to bind to or interact with a SPOIL target molecule can be accomplished by determining the activity of the target molecule. For example, the activity of the target molecule can be determined by detecting induction or lack of induction of a cellular second messenger of the target (i.e. intracellular Ca²⁺, diacylglycerol, IP₃, PGE₂, etc.), detecting catalytic/enzymatic activity of the target an appropriate substrate, detecting the induction of a reporter gene (comprising a SPOIL and/or IL-1-responsive regulatory element operatively linked to a nucleic acid encoding a detectable marker, e.g., luciferase), or detecting a cellular response or lack of a cellular response, for example, SPOIL and/or IL-1 stimulated development, differentiation or rate of proliferation.

[0884] In yet another embodiment, the assay is a cell-free assay in which a SPOIL protein or biologically active portion thereof is contacted with a test compound and the ability of the test compound to modulate (e.g., stimulate or inhibit) the activity of the SPOIL protein or biologically active portion thereof is determined. Determining the ability of the test compound to modulate the activity of a SPOIL protein can be accomplished, for example, by determining the ability of the SPOIL protein to bind to a SPOIL target molecule in the presence and/or absence of the test compound. Determining the ability of the test compound to modulate the activity of a SPOIL protein can be accomplished in the presence or absence of IL-1. Determining the ability of the SPOIL protein to bind to a SPOIL target molecule can also be accomplished using a technology such as real-time Biomolecular Interaction Analysis (BIA). Sjolander et al. (1991) Anal. Chem. 63:2338-2345 and Szabo et al. (1995) Curr. Opin. Struct. Biol. 5:699-705. As used herein, “BIA” is a technology for studying biospecific interactions in real time, without labeling any of the interactants (e.g., BIAcore™). Changes in the optical phenomenon surface plasmon resonance (SPR) can be used as an indication of real-time reactions between biological molecules.

[0885] In more than one embodiment of the above assay methods of the present invention, it may be desirable to immobilize either SPOIL or its target molecule to facilitate separation of complexed from uncomplexed forms of one or both of the proteins, as well as to accommodate automation of the assay. Binding of a test compound to a SPOIL protein, or interaction of a SPOIL protein with a target molecule in the presence and absence of a candidate compound, can be accomplished in any vessel suitable for containing the reactants. Examples of such vessels include microtitre plates, test tubes, and micro-centrifuge tubes. In one embodiment, a fusion protein can be provided which adds a domain that allows one or both of the proteins to be bound to a matrix. For example, glutathione-S-transferase/SPOIL fusion proteins or glutathione-S-transferase/target fusion proteins can be adsorbed onto glutathione sepharose beads (Sigma Chemical, St. Louis, Mo.) or glutathione derivatized microtitre plates, which are then combined with the test compound or the test compound and either the non-adsorbed target protein or SPOIL protein, and the mixture incubated under conditions conducive to complex formation (e.g., at physiological conditions for salt and pH). Following incubation, the beads or microtitre plate wells are washed to remove any unbound components, the matrix immobilized in the case of beads, complex determined either directly or indirectly, for example, as described above. Alternatively, the complexes can be dissociated from the matrix, and the level of SPOIL binding or activity determined using standard techniques.

[0886] Other techniques for immobilizing proteins on matrices can also be used in the screening assays of the invention. For example, either a SPOIL protein or a SPOIL target molecule can be immobilized utilizing conjugation of biotin and streptavidin. Biotinylated SPOIL protein or target molecules can be prepared from biotin-NHS (N-hydroxy-succinimide) using techniques well known in the art (e.g., biotinylation kit, Pierce Chemicals, Rockford, Ill.), and immobilized in the wells of streptavidin-coated 96 well plates (Pierce Chemical). Alternatively, antibodies reactive with SPOIL protein or target molecules but which do not interfere with binding of the SPOIL protein to its target molecule can be derivatized to the wells of the plate, and unbound target or SPOIL protein trapped in the wells by antibody conjugation. Methods for detecting such complexes, in addition to those described above for the GST-immobilized complexes, include immunodetection of complexes using antibodies reactive with the SPOIL protein or target molecule, as well as enzyme-linked assays which rely on detecting an enzymatic activity associated with the SPOIL protein or target molecule.

[0887] In yet another aspect of the invention, the SPOIL proteins can be used as “bait proteins” in a two-hybrid assay or three-hybrid assay (see, e.g., U.S. Pat. No. 5,283,317; Zervos et al. (1993) Cell 72:223-232; Madura et al. (1993) J. Biol. Chem. 268:12046-12054; Bartel et al. (1993) Biotechniques 14:920-924; Iwabuchi et al. (1993) Oncogene 8:1693-1696; and Brent WO94/10300), to identify other proteins, which bind to or interact with SPOIL (“SPOIL-binding proteins” or “SPOIL-bp”) and modulate SPOIL activity. Such SPOIL-binding proteins are also likely to be involved in the propagation of signals by the SPOIL proteins as, for example, downstream elements of a SPOIL-mediated signaling pathway. Alternatively, such SPOIL-binding proteins are likely to be cell-surface molecules associated with non-SPOIL expressing cells, wherein such SPOIL-binding proteins are involved in signal transduction.

[0888] The two-hybrid system is based on the modular nature of most transcription factors, which consist of separable DNA-binding and activation domains. Briefly, the assay utilizes two different DNA constructs. In one construct, the gene that codes for a SPOIL protein is fused to a gene encoding the DNA binding domain of a known transcription factor (e.g., GAL-4). In the other construct, a DNA sequence, from a library of DNA sequences, that encodes an unidentified protein (“prey” or “sample”) is fused to a gene that codes for the activation domain of the known transcription factor. If the “bait” and the “prey” proteins are able to interact, in vivo, forming a SPOIL-dependent complex, the DNA-binding and activation domains of the transcription factor are brought into close proximity. This proximity allows transcription of a reporter gene (e.g., LacZ) which is operably linked to a transcriptional regulatory site responsive to the transcription factor. Expression of the reporter gene can be detected and cell colonies containing the functional transcription factor can be isolated and used to obtain the cloned gene which encodes the protein which interacts with the SPOIL protein.

[0889] This invention further pertains to novel SPOIL agents such as SPOIL proteins or biologically active portions thereof, SPOIL variants which function as IL-1 receptor agonists and nucleic acid molecules encoding a SPOIL protein or variant, which can be screened to determine the efficacy of such agents on various SPOIL and/or IL-1 stimulated activities (e.g., stimulated immune response, proliferation, signal transduction pathway, or differentiation).

[0890] In one embodiment, determining the ability of a SPOIL agent to modulate the activity of SPOIL and/or IL-1 can be accomplished by testing the ability of the agent to interfere with the proliferation of T cells in the presence of SPOIL and/or IL-1.

[0891] It is also within the scope of this invention to further use a SPOIL agent as described herein in an appropriate animal model. For example, an agent as described herein (e.g., a modulating agent) can be used in an animal model to determine the efficacy, toxicity, or side effects of treatment with such an agent. Alternatively, a SPOIL agent identified as described herein can be used in an animal model to determine the mechanism of action of such an agent. Animal models for use in determining the efficacy or mechanism of action of a SPOIL agent of the present invention include animal models demonstrating parameters of sepsis (e.g., animals injected with E. coli to induce hypotension) and animal models for determining bone metabolism (e.g., lethally irradiated mice which have been transplanted with SPOIL infected marrow cells). Other animal models which are recognized in the art as predictive of results in humans with various IL-1 induced disorders are known in the art and described, for example, in Dinarello (1991) Blood 77(8):1627-1652. Furthermore, this invention pertains to uses of SPOIL agents and agents identified by the above-described screening assays for treatments as described herein.

### NEOKINE Screening Assays:

[0892] The invention provides a method (also referred to herein as a “screening assay”) for identifying modulators, i.e., candidate or test compounds or agents (e.g., peptides, peptidomimetics, small molecules or other drugs) which bind to NEOKINE proteins, bind to NEOKINE receptors, have a stimulatory or inhibitory effect on, for example, NEOKINE expression, NEOKINE activity, or NEOKINE receptor activity (e.g., RDC1 activity), or have a stimulatory or inhibitory effect on, for example, the expression or activity of a non-NEOKINE chemokine or non-NEOKINE chemokine receptor. It will be appreciated by one of skill in the art that modulators identified by the screening assays defined herein (e.g., modulators of NEOKINE and/or NEOKINE receptor or RDC1) can be used in the prophylactic and therapeutic treatment of diseases and disorders associated with aberrant NEOKINE and/or NEOKINE receptor activity (e.g., proliferative disorders and diseases).

[0893] In one embodiment, the invention provides assays for screening candidate or test compounds which bind to or modulate the activity of a NEOKINE protein or polypeptide or biologically active portion thereof. In another embodiment, the invention provides assays for screening candidate or test compounds which bind to or modulate the activity of a NEOKINE receptor. The test compounds of the present invention can be obtained using any of the numerous approaches in combinatorial library methods known in the art, including: biological libraries; spatially addressable parallel solid phase or solution phase libraries; synthetic library methods requiring deconvolution; the ‘one-bead one-compound’ library method; and synthetic library methods using affinity chromatography selection. The biological library approach is limited to peptide libraries, while the other four approaches are applicable to peptide, non-peptide oligomer or small molecule libraries of compounds (Lam, K. S. (1997) Anticancer Drug Des. 12:145).

[0894] Examples of methods for the synthesis of molecular libraries can be found in the art, for example in: DeWitt et al. (1993) Proc. Natl. Acad. Sci. U.S.A. 90:6909; Erb et al. (1994) Proc. Natl. Acad. Sci. USA 91:11422; Zuckermann et al. (1994). J. Med. Chem. 37:2678; Cho et al. (1993) Science 261:1303; Carrell et al. (1994) Angew. Chem. Int. Ed. Engl. 33:2059; Carell et al. (1994) Angew. Chem. Int. Ed. Engl. 33:2061; and in Gallop et al. (1994). J. Med. Chem. 37:1233.

[0895] Libraries of compounds may be presented in solution (e.g., Houghten (1992) Biotechniques 13:412-421), or on beads (Lam (1991) Nature 354:82-84), chips (Fodor (1993) Nature 364:555-556), bacteria (Ladner U.S. Pat. No. 5,223,409), spores (Ladner U.S. Pat. No. '409), plasmids (Cull et al. (1992) Proc Natl Acad Sci USA 89:1865-1869) or on phage (Scott and Smith (1990) Science 249:386-390); (Devlin (1990) Science 249:404-406); (Cwirla et al. (1990) Proc. Natl. Acad. Sci. 87:6378-6382); (Felici (1991) J. Mol. Biol. 222:301-310); (Ladner supra.).

[0896] In one embodiment, an assay is a cell-based assay in which a cell which expresses a NEOKINE receptor on the cell surface is contacted with a test compound and the ability of the test compound to bind to a NEOKINE receptor determined. The cell, for example, can be of mammalian origin or a yeast cell. The NEOKINE receptor can be heterologously expressed or over expressed in a host cell (e.g., a COS cell or fibroblastic cell, for example a HEK293 cell). Alternatively, an assay cell can be selected which endogenously expresses a NEOKINE receptor (e.g., RDC1), for example, a rat pancreatic acinar cell line, AR4-2J, a PC12 pheochromocytoma cell, a SK-N-MC neroblastoma cell, a MES-13 mesangial tumor cell, an astrocyte, or a neutrophil). (Hesen et al. (1998) Immunogenetics 47:364-370 and Law and Rosenzweig (1994) Biochem. Biophys. Res. Commun. 201:458-465). Yeast cells are also particularly amenable for use in screening assays for G-protein-coupled receptors as described, for example, in Pausch (1997) TIBTECH 15:487-494. Determining the ability of the test compound to bind to a NEOKINE receptor can be accomplished, for example, by coupling the test compound with a radioisotope or enzymatic label such that binding of the test compound to the NEOKINE receptor can be determined by detecting the labeled compound in a complex. For example, test compounds can be labeled with ¹²⁵I, ³⁵S, ¹⁴C, or ³H, either directly or indirectly, and the radioisotope detected by direct counting of radioemmission or by scintillation counting. Alternatively, test compounds can be enzymatically labeled with, for example, horseradish peroxidase, alkaline phosphatase, or luciferase, and the enzymatic label detected by determination of conversion of an appropriate substrate to product.

[0897] It is also within the scope of this invention to determine the ability of a test compound to interact with an NEOKINE receptor without the labeling of any of the interactants. For example, a microphysiometer can be used to detect the interaction of a test compound with an NEOKINE receptor without the labeling of either the test compound or the receptor. McConnell, H. M. et al. (1992) Science 257:1906-1912. As used herein, a “microphysiometer” (e.g., Cytosensor™) is an analytical instrument that measures the rate at which a cell acidifies its environment using a light-addressable potentiometric sensor (LAPS). Changes in this acidification rate can be used as an indicator of the interaction between ligand and receptor.

[0898] In a preferred embodiment, the assay comprises contacting a cell which expresses an NEOKINE receptor on the cell surface with a NEOKINE protein or biologically-active portion thereof and a test compound, and determining the ability of the test compound to modulate binding of the NEOKINE protein or biologically-active portion thereof to the NEOKINE receptor. Determining the ability of the test compound to modulate binding of the NEOKINE protein or biologically-active portion thereof to the NEOKINE receptor can comprise determining the ability of the test compound to preferentially bind to the NEOKINE receptor as compared to the ability of NEOKINE, or a biologically active portion thereof, to bind to the receptor. Alternatively, determining the ability of the test compound to modulate binding of the NEOKINE protein or biologically-active portion thereof to the NEOKINE receptor can comprise determining a change in the binding of the NEOKINE protein or biologically-active portion thereof to the NEOKINE receptor (e.g., a change in the amount of binding in the presence of the test compound as compared to the absence of the test compound).

[0899] In another preferred embodiment, the assay comprises contacting a cell which expresses a receptor specific for another chemokine on the cell surface with an NEOKINE protein or biologically-active portion thereof and a test compound, and determining the ability of the test compound to interact with the receptor, wherein determining the ability of the test compound to interact with the receptor comprises determining the ability of the test compound to preferentially bind to the receptor as compared to the ability of the NEOKINE, or a biologically active portion thereof, to bind to the receptor. Alternatively, determining the ability of the test compound to interact with the NEOKINE receptor can comprise determining a change in the binding of the NEOKINE protein or biologically-active portion thereof to the NEOKINE receptor (e.g., a change in the amount of binding).

[0900] In another embodiment, an assay is a cell-based assay comprising contacting a cell expressing a NEOKINE target molecule (e.g. a NEOKINE receptor) with a test compound and determining the ability of the test compound to modulate (e.g. stimulate or inhibit) the activity of the NEOKINE target molecule. In yet another embodiment, an assay is a cell-based assay comprising contacting a cell expressing a NEOKINE receptor with a NEOKINE protein or biologically-active portion thereof and a test compound and determining the ability of the test compound to modulate the activity of the NEOKINE target molecule.

[0901] Determining the ability of the NEOKINE protein to bind to or interact with an NEOKINE target molecule can be accomplished by one of the methods described above for determining direct binding. The activity of the target molecule can be determined by detecting induction of a cellular second messenger of the target (i.e. intracellular Ca²⁺, diacylglycerol, IP₃, etc.), detecting catalytic/enzymatic activity of the target an appropriate substrate, detecting the induction of a reporter gene (comprising an NEOKINE-responsive regulatory element operatively linked to a nucleic acid encoding a detectable marker, e.g., luciferase), or detecting a cellular response, for example, an angiogenic response or an inflammatory response.

[0902] In yet another embodiment, an assay of the present invention is a cell-free assay in which an NEOKINE protein or biologically active portion thereof is contacted with a test compound and the ability of the test compound to bind to the NEOKINE protein or biologically active portion thereof is determined. Binding of the test compound to the NEOKINE protein can be determined either directly or indirectly as described above. In a preferred embodiment, the assay includes contacting the NEOKINE protein or biologically active portion thereof with a known compound which binds NEOKINE to form an assay mixture, contacting the assay mixture with a test compound, and determining the ability of the test compound to interact with an NEOKINE protein, wherein determining the ability of the test compound to interact with an NEOKINE protein comprises determining the ability of the test compound to preferentially bind to NEOKINE or biologically active portion thereof as compared to the known compound.

[0903] In another embodiment, the assay is a cell-free assay in which an NEOKINE protein or biologically active portion thereof is contacted with a test compound and the ability of the test compound to modulate (e.g., stimulate or inhibit) the activity of the NEOKINE protein or biologically active portion thereof is determined. Determining the ability of the test compound to modulate the activity of an NEOKINE protein can be accomplished, for example, by determining the ability of the NEOKINE protein to bind to an NEOKINE target molecule by one of the methods described above for determining direct binding. Determining the ability of the NEOKINE protein to bind to an NEOKINE target molecule can also be accomplished using a technology such as real-time Biomolecular Interaction Analysis (BIA). Sjolander and Urbaniczky (1991) Anal. Chem. 63:2338-2345 and Szabo et al. (1995) Curr. Opin. Struct. Biol. 5:699-705. As used herein, “BIA” is a to technology for studying biospecific interactions in real time, without labeling any of the interactants (e.g., BIAcore™). Changes in the optical phenomenon of surface plasmon resonance (SPR) can be used as an indication of real-time reactions between biological molecules.

[0904] In an alternative embodiment, determining the ability of the test compound to modulate the activity of an NEOKINE protein can be accomplished by determining the ability of the NEOKINE protein to further modulate the activity of a downstream effector (e.g., an intracellular signaling molecule) of an NEOKINE target molecule (e.g., an NEOKINE receptor). For example, the catalytic/enzymatic activity of the effector molecule on an appropriate substrate can be determined as previously described.

[0905] In yet another embodiment, the cell-free assay involves contacting an NEOKINE protein or biologically active portion thereof with a known compound which binds the NEOKINE protein to form an assay mixture, contacting the assay mixture with a test compound, and determining the ability of the test compound to interact with the NEOKINE protein, wherein determining the ability of the test compound to interact with the NEOKINE protein comprises determining the ability of the NEOKINE protein to preferentially bind to or modulate the activity of an NEOKINE target molecule.

[0906] The assays of the present invention are based at least in part on the discovery that NEOKINE receptor is the previously identified orphan chemokine receptor, RDC1. The nucleic acid sequence of human, murine and canine RDC1 are set forth in SEQ ID NO:129, SEQ ID NO:131 and SEQ ID NO:133, respectively. The amino acid sequences of human, murine and canine RDC1 are set forth in SEQ ID NO:130, SEQ ID NO:132 or SEQ ID NO:134, respectively. Human, murine and canine RDC1 sequences can be further found at Accession Nos. U73141 & U67784, AF000236, and X14048, respectively. Accordingly, in one embodiment, the NEOKINE receptor has the amino acid set forth in any of SEQ ID NO:130, SEQ ID NO:132 or SEQ ID NO:134. In another embodiment, the NEOKINE receptor is selected encoded by a nucleic acid molecule selected from the group consisting of SEQ ID NO:129, SEQ ID NO:131 or SEQ ID NO:133. In another embodiment the NEOKINE receptor is selected from the group consisting of a receptor having an amino acid sequence which is substantially homologous to the amino acid sequence of any of SEQ ID NO:130, SEQ ID NO:132 or SEQ ID NO:134; a receptor which is encoded by an isolated nucleic acid molecule which is substantially homologous to any of SEQ ID NO:129, SEQ ID NO:131 or SEQ ID NO:133; or a receptor which is encoded by an isolated nucleic acid molecule which hybridizes under stringent conditions to a nucleic acid molecule having any of SEQ ID NO:129, SEQ ID NO:131 or SEQ ID NO:133.

[0907] The cell-free assays of the present invention are amenable to use of both soluble and/or membrane-bound forms of isolated proteins (e.g. NEOKINE proteins or biologically active portions thereof or NEOKINE receptors). In the case of cell-free assays in which a membrane-bound form an isolated protein is used (e.g., a NEOKINE receptor) it may be desirable to utilize a solubilizing agent such that the membrane-bound form of the isolated protein is maintained in solution. Examples of such solubilizing agents include non-ionic detergents such as n-octylglucoside, n-dodecylglucoside, n-dodecylmaltoside, octanoyl-N-methylglucamide, decanoyl-N-methylglucamide, Triton® X-100, Triton® X-114, Thesit®, Isotridecypoly(ethylene glycol ether)n, 3-[(3-cholamidopropyl)dimethylamminio]-1-propane sulfonate (CHAPS), 3-[(3-cholamidopropyl)dimethylamminio]-2-hydroxy-1-propane sulfonate (CHAPSO), or N-dodecyl=N,N-dimethyl-3-ammonio-1-propane sulfonate.

[0908] In more than one embodiment of the above assay methods of the present invention, it may be desirable to immobilize either NEOKINE or its target molecule to facilitate separation of complexed from uncomplexed forms of one or both of the proteins, as well as to accommodate automation of the assay. Binding of a test compound to a NEOKINE protein, or interaction of a NEOKINE protein with a target molecule in the presence and absence of a candidate compound, can be accomplished in any vessel suitable for containing the reactants. Examples of such vessels include microtitre plates, test tubes, and micro-centrifuge tubes. In one embodiment, a fusion protein can be provided which adds a domain that allows one or both of the proteins to be bound to a matrix. For example, glutathione-S-transferase/NEOKINE fusion proteins or glutathione-S-transferase/target fusion proteins can be adsorbed onto glutathione sepharose beads (Sigma Chemical, St. Louis, Mo.) or glutathione derivatized microtitre plates, which are then combined with the test compound or the test compound and either the non-adsorbed target protein or NEOKINE protein, and the mixture incubated under conditions conducive to complex formation (e.g., at physiological conditions for salt and pH). Following incubation, the beads or microtitre plate wells are washed to remove any unbound components, the matrix immobilized in the case of beads, complex determined either directly or indirectly, for example, as described above. Alternatively, the complexes can be dissociated from the matrix, and the level of NEOKINE binding or activity determined using standard techniques.

[0909] Other techniques for immobilizing proteins on matrices can also be used in the screening assays of the invention. For example, either a NEOKINE protein or a NEOKINE target molecule can be immobilized utilizing conjugation of biotin and streptavidin. Biotinylated NEOKINE protein or target molecules can be prepared from biotin-NHS (N-hydroxy-succinimide) using techniques well known in the art (e.g., biotinylation kit, Pierce Chemicals, Rockford, Ill.), and immobilized in the wells of streptavidin-coated 96 well plates (Pierce Chemical). Alternatively, antibodies reactive with NEOKINE protein or target molecules but which do not interfere with binding of the NEOKINE protein to its target molecule can be derivatized to the wells of the plate, and unbound target or NEOKINE protein trapped in the wells by antibody conjugation. Methods for detecting such complexes, in addition to those described above for the GST-immobilized complexes, include immunodetection of complexes using antibodies reactive with the NEOKINE protein or target molecule, as well as enzyme-linked assays which rely on detecting an enzymatic activity associated with the NEOKINE protein or target molecule.

[0910] In another embodiment, modulators of NEOKINE expression are identified in a method wherein a cell is contacted with a candidate compound and the expression of NEOKINE mRNA or protein in the cell is determined. The level of expression of NEOKINE mRNA or protein in the presence of the candidate compound is compared to the level of expression of NEOKINE mRNA or protein in the absence of the candidate compound. The candidate compound can then be identified as a modulator of NEOKINE expression based on this comparison. For example, when expression of NEOKINE mRNA or protein is greater (statistically significantly greater) in the presence of the candidate compound than in its absence, the candidate compound is identified as a stimulator of NEOKINE mRNA or protein expression. Alternatively, when expression of NEOKINE mRNA or protein is less (statistically significantly less) in the presence of the candidate compound than in its absence, the candidate compound is identified as an inhibitor of NEOKINE mRNA or protein expression. The level of NEOKINE mRNA or protein expression in the cells can be determined by methods described herein for detecting NEOKINE mRNA or protein.

[0911] In yet another aspect of the invention, the NEOKINE proteins can be used as “bait proteins” in a two-hybrid assay or three-hybrid assay (see, e.g., U.S. Pat. No. 5,283,317; Zervos et al. (1993) Cell 72:223-232; Madura et al. (1993) J. Biol. Chem. 268:12046-12054; Bartel et al. (1993) Biotechniques 14:920-924; Iwabuchi et al. (1993) Oncogene 8:1693-1696; and Brent WO94/10300), to identify other proteins, which bind to or interact with NEOKINE (“NEOKINE-binding proteins” or “NEOKINE-bp”) and are involved in NEOKINE activity. Such NEOKINE-binding proteins are also likely to be involved in the propagation of signals by the NEOKINE proteins as, for example, downstream elements of a NEOKINE-mediated signaling pathway. Alternatively, such NEOKINE-binding proteins are likely to be cell-surface molecules associated with non-NEOKINE expressing cells, wherein such NEOKINE-binding proteins are involved in chemoattraction.

[0912] The two-hybrid system is based on the modular nature of most transcription factors, which consist of separable DNA-binding and activation domains. Briefly, the assay utilizes two different DNA constructs. In one construct, the gene that codes for a NEOKINE protein is fused to a gene encoding the DNA binding domain of a known transcription factor (e.g., GAL-4). In the other construct, a DNA sequence, from a library of DNA sequences, that encodes an unidentified protein (“prey” or “sample”) is fused to a gene that codes for the activation domain of the known transcription factor. If the “bait” and the “prey” proteins are able to interact, in vivo, forming a NEOKINE-dependent complex, the DNA-binding and activation domains of the transcription factor are brought into close proximity. This proximity allows transcription of a reporter gene (e.g., LacZ) which is operably linked to a transcriptional regulatory site responsive to the transcription factor. Expression of the reporter gene can be detected and cell colonies containing the functional transcription factor can be isolated and used to obtain the cloned gene which encodes the protein which interacts with the NEOKINE protein.

[0913] This invention further pertains to novel agents identified by the above-described screening assays. Accordingly, it is within the scope of this invention to further use an agent identified as described herein in an appropriate animal model. For example, an agent identified as described herein (e.g., a NEOKINE modulating agent, an antisense NEOKINE nucleic acid molecule, a NEOKINE-specific antibody, or a NEOKINE-binding partner) can be used in an animal model to determine the efficacy, toxicity, or side effects of treatment with such an agent. Alternatively, an agent identified as described herein can be used in an animal model to determine the mechanism of action of such an agent. Furthermore, this invention pertains to uses of novel agents identified by the above-described screening assays for treatments as described herein.

### FTHMA-070, Tango85, Tango77, SPOIL, NEOKINE, Tango129 or A259 Detection Assays

[0914] Portions or fragments of the cDNA sequences identified herein (and the corresponding complete gene sequences) can be used in numerous ways as polynucleotide reagents. For example, these sequences can be used to: (i) map their respective genes on a chromosome; and, thus, locate gene regions associated with genetic disease; (ii) identify an individual from a minute biological sample (tissue typing); and (iii) aid in forensic identification of a biological sample. These applications are described in the subsections below.

### FTHMA-070, Tango85, Tango77, SPOIL, NEOKINE, Tango129 or A259 Chromosome Mapping

[0915] Once the sequence (or a portion of the sequence) of a gene has been isolated, this sequence can be used to map the location of the gene on a chromosome. Accordingly, FTHMA-070, Tango85, Tango77, SPOIL, NEOKINE, Tango129 or A259 nucleic acid molecules described herein or fragments thereof, can be used to map the location of FTHMA-070, Tango85, Tango77, SPOIL, NEOKINE, Tango129 or A259 genes on a chromosome. The mapping of the FTHMA-070, Tango85, Tango77, SPOIL, NEOKINE, Tango129 or A259 sequences to chromosomes is an important first step in correlating these sequences with genes associated with disease.

[0916] Briefly, FTHMA-070, Tango85, Tango77, SPOIL, NEOKINE, Tango129 or A259 genes can be mapped to chromosomes by preparing PCR primers (preferably 15-25 bp in length) from the FTHMA-070, Tango85, Tango77, SPOIL, NEOKINE, Tango129 or A259 sequences. Computer analysis of FTHMA-070, Tango85, Tango77, SPOIL, NEOKINE, Tango129 or A259 sequences can be used to rapidly select primers that do not span more than one exon in the genomic DNA, thus complicating the amplification process. These primers can then be used for PCR screening of somatic cell hybrids containing individual human chromosomes. Only those hybrids containing the human gene corresponding to the FTHMA-070, Tango85, Tango77, SPOIL, NEOKINE, Tango129 or A259 sequences will yield an amplified fragment.

[0917] Somatic cell hybrids are prepared by fusing somatic cells from different mammals (e.g., human and mouse cells). As hybrids of human and mouse cells grow and divide, they gradually lose human chromosomes in random order, but retain the mouse chromosomes. By using media in which mouse cells cannot grow, because they lack a particular enzyme, but human cells can, the one human chromosome that contains the gene encoding the needed enzyme, will be retained. By using various media, panels of hybrid cell lines can be established. Each cell line in a panel contains either a single human chromosome or a small number of human chromosomes, and a full set of mouse chromosomes, allowing easy mapping of individual genes to specific human chromosomes. (D'Eustachio et al. (1983) Science 220:919-924). Somatic cell hybrids containing only fragments of human chromosomes can also be produced by using human chromosomes with translocations and deletions.

[0918] PCR mapping of somatic cell hybrids is a rapid procedure for assigning a particular sequence to a particular chromosome. Three or more sequences can be assigned per day using a single thermal cycler. Using the FTHMA-070, Tango85, Tango77, SPOIL, NEOKINE, Tango129 or A259 sequences to design oligonucleotide primers, sublocalization can be achieved with panels of fragments from specific chromosomes. Other mapping strategies which can similarly be used to map a FTHMA-070, Tango85, Tango77, SPOIL, NEOKINE, Tango129 or A259 sequence to its chromosome include in situ hybridization (described in Fan et al. (1990) Proc. Natl. Acad. Sci. USA 87:6223-27), pre-screening with labeled flow-sorted chromosomes, and pre-selection by hybridization to chromosome specific cDNA libraries.

[0919] Fluorescence in situ hybridization (FISH) of a DNA sequence to a metaphase chromosomal spread can further be used to provide, a precise chromosomal location in one step. Chromosome spreads can be made using cells whose division has been blocked in metaphase by a chemical like colcemid that disrupts the mitotic spindle. The chromosomes can be treated briefly with trypsin, and then stained with Giemsa. A pattern of light and dark bands develops on each chromosome, so that the chromosomes can be identified individually. The FISH technique can be used with a DNA sequence as short as 500 or 600 bases. However, clones larger than 1,000 bases have a higher likelihood of binding to a unique chromosomal location with sufficient signal intensity for simple detection. Preferably 1,000 bases, and more preferably 2,000 bases will suffice to get good results at a reasonable amount of time. For a review of this technique, see Verma et al., Human Chromosomes: A Manual of Basic Techniques (Pergamon Press, New York, 1988).

[0920] Reagents for chromosome mapping can be used individually to mark a single chromosome or a single site on that chromosome, or panels of reagents can be used for marking multiple sites and/or multiple chromosomes. Reagents corresponding to noncoding regions of the genes actually are preferred for mapping purposes. Coding sequences are more likely to be conserved within gene families, thus increasing the chance of cross hybridizations during chromosomal mapping.

[0921] Once a sequence has been mapped to a precise chromosomal location, the physical position of the sequence on the chromosome can be correlated with genetic map data. (Such data are found, for example, in V. McKusick, Mendelian Inheritance in Man, available on-line through Johns Hopkins University Welch Medical Library). The relationship between genes and disease, mapped to the same chromosomal region, can then be identified through linkage analysis (co-inheritance of physically adjacent genes), described in, e.g., Egeland et al. (1987) Nature, 325:783-787.

[0922] Moreover, differences in the DNA sequences between individuals affected and unaffected with a disease associated with the FTHMA-070, Tango85, Tango77, SPOIL, NEOKINE, Tango129 or A259 gene can be determined. If a mutation is observed in some or all of the affected individuals but not in any unaffected individuals, then the mutation is likely to be the causative agent of the particular disease. Comparison of affected and unaffected individuals generally involves first looking for structural alterations in the chromosomes such as deletions or translocations that are visible from chromosome spreads or detectable using PCR based on that DNA sequence. Ultimately, complete sequencing of genes from several individuals can be performed to confirm the presence of a mutation and to distinguish mutations from polymorphisms.

### 2. FTHMA-070, Tango85, Tango77, SPOIL, NEOKINE, Tango129 or A259 Tissue Typing

[0923] The FTHMA-070, Tango85, Tango77, SPOIL, NEOKINE, Tango129 or A259 sequences of the present invention can also be used to identify individuals from minute biological samples. The United States military, for example, is considering the use of restriction fragment length polymorphism (RFLP) for identification of its personnel. In this technique, an individual's genomic DNA is digested with one or more restriction enzymes, and probed on a Southern blot to yield unique bands for identification. This method does not suffer from the current limitations of “Dog Tags” which can be lost, switched, or stolen, making positive identification difficult. The sequences of the present invention are useful as additional DNA markers for RFLP (described in U.S. Pat. No. 5,272,057).

[0924] Furthermore, the sequences of the present invention can be used to provide an alternative technique which determines the actual base-by-base DNA sequence of selected portions of an individual's genome. Thus, the FTHMA-070, Tango85, Tango77, SPOIL, NEOKINE, Tango129 or A259 sequences described herein can be used to prepare two PCR primers from the 5′ and 3′ ends of the sequences. These primers can then be used to amplify an individual's DNA and subsequently sequence it.

[0925] Panels of corresponding DNA sequences from individuals, prepared in this manner, can provide unique individual identifications, as each individual will have a unique set of such DNA sequences due to allelic differences. The sequences of the present invention can be used to obtain such identification sequences from individuals and from tissue. The FTHMA-070, Tango85, Tango77, SPOIL, NEOKINE, Tango129 or A259 sequences of the invention uniquely represent portions of the human genome. Allelic variation occurs to some degree in the coding regions of these sequences, and to a greater degree in the noncoding regions. It is estimated that allelic variation between individual humans occurs with a frequency of about once per each 500 bases. Each of the sequences described herein can, to some degree, be used as a standard against which DNA from an individual can be compared for identification purposes. Because greater numbers of polymorphisms occur in the noncoding regions, fewer sequences are necessary to differentiate individuals. The noncoding sequences of SEQ ID NO:53, 57, 71, 89, 101, 16, 112, 115, 137, 145 or 163 can comfortably provide positive individual identification with a panel of perhaps 10 to 1,000 primers which each yield a noncoding amplified sequence of 100 bases. If predicted coding sequences, such as those in SEQ ID NO:55, 59, 73, 76, 80, 91, 103, 106, 117, 139, 146 or 164 are used, a more appropriate number of primers for positive individual identification would be 500-2,000.

[0926] If a panel of reagents from FTHMA-070, Tango85, Tango77, SPOIL, NEOKINE, Tango129 or A259 sequences described herein is used to generate a unique identification database for an individual, those same reagents can later be used to identify tissue from that individual. Using the unique identification database, positive identification of the individual, living or dead, can be made from extremely small tissue samples.

### 3. Use of Partial FTHMA-070, Tango85, Tango77, SPOIL, NEOKINE, Tango129 or A259

### Sequences in Forensic Biology

[0927] DNA-based identification techniques can also be used in forensic biology. Forensic biology is a scientific field employing genetic typing of biological evidence found at a crime scene as a means for positively identifying, for example, a perpetrator of a crime. To make such an identification, PCR technology can be used to amplify DNA sequences taken from very small biological samples such as tissues, e.g., hair or skin, or body fluids, e.g., blood, saliva, or semen found at a crime scene. The amplified sequence can then be compared to a standard, thereby allowing identification of the origin of the biological sample.

[0928] The sequences of the present invention can be used to provide polynucleotide reagents, e.g., PCR primers, targeted to specific loci in the human genome, which can enhance the reliability of DNA-based forensic identifications by, for example, providing another “identification marker” (i.e. another DNA sequence that is unique to a particular individual). As mentioned above, actual base sequence information can be used for identification as an accurate alternative to patterns formed by restriction enzyme generated fragments. Sequences targeted to noncoding regions are particularly appropriate for this use as greater numbers of polymorphisms occur in the noncoding regions, making it easier to differentiate individuals using this technique. Examples of polynucleotide reagents include the FTHMA-070, T85 or A259 sequences or portions thereof, e.g., fragments derived from the noncoding regions having a length of at least 20 or 30 bases.

[0929] The sequences of the present invention can be used to provide polynucleotide reagents, e.g., PCR primers, targeted to specific loci in the human genome, which can enhance the reliability of DNA-based forensic identifications by, for example, providing another “identification marker” (i.e. another DNA sequence that is unique to a particular individual). As mentioned above, actual base sequence information can be used for identification as an accurate alternative to patterns formed by restriction enzyme generated fragments. Sequences targeted to noncoding regions of SEQ ID NO:71, SEQ ID NO:89, SEQ ID NO:101, or SEQ ID NO:104, SEQ ID NO:112, SEQ ID NO:115 are particularly appropriate for this use as greater numbers of polymorphisms occur in the noncoding regions, making it easier to differentiate individuals using this technique. Examples of polynucleotide reagents include the Tango77, SPOIL, NEOKINE or Tango129 nucleotide sequences or portions thereof, e.g., fragments derived from the noncoding regions of SEQ ID NO:71, SEQ ID NO:89, SEQ ID NO:101, or SEQ ID NO:104, SEQ ID NO:112, SEQ ID NO:115 having a length of at least 20 bases, preferably at least 30 bases.

[0930] The FTHMA-070, Tango85, Tango77, SPOIL, NEOKINE, Tango129 or A259 sequences described herein can further be used to provide polynucleotide reagents, e.g., labeled or labelable probes which can be used in, for example, an in situ hybridization technique, to identify a specific tissue, e.g., brain tissue. This can be very useful in cases where a forensic pathologist is presented with a tissue of unknown origin. Panels of such FTHMA-070, Tango85, Tango77, SPOIL, NEOKINE, Tango129 or A259 probes can be used to identify tissue by species and/or by organ type.

[0931] In a similar fashion, these reagents, e.g., FTHMA-070, Tango85, Tango77, SPOIL, NEOKINE, Tango129 or A259 primers or probes can be used to screen tissue culture for contamination (i.e., screen for the presence of a mixture of different types of cells in a culture).

### FTHMA-070, Tango85, Tango77, SPOIL, NEOKINE, Tango129 or A259 Predictive Medicine

[0932] The present invention also pertains to the field of predictive medicine in which diagnostic assays, prognostic assays, pharmacogenomics, and monitoring clinical trails are used for prognostic (predictive) purposes to thereby treat an individual prophylactically. Accordingly, one aspect of the present invention relates to diagnostic assays for determining FTHMA-070, Tango85, Tango77, SPOIL, NEOKINE, Tango129 or A259 protein and/or nucleic acid expression as well as FTHMA-070, Tango85, Tango77, SPOIL, NEOKINE, Tango129 or A259 activity, in the context of a biological sample (e.g., blood, serum, cells, tissue) to thereby determine whether an individual is afflicted with a disease or disorder, or is at risk of developing a disorder, associated with aberrant FTHMA-070, Tango85, Tango77, SPOIL, NEOKINE, Tango129 or A259 expression or activity. The invention also provides for prognostic (or predictive) assays for determining whether an individual is at risk of developing a disorder associated with FTHMA-070, Tango85, Tango77, SPOIL, NEOKINE, Tango129 or A259 protein, nucleic acid expression or activity. For example, mutations in a FTHMA-070, Tango85, Tango77, SPOIL, NEOKINE, Tango129 or A259 gene can be assayed in a biological sample. Such assays can be used for prognostic or predictive purpose to thereby prophylactically treat an individual prior to the onset of a disorder characterized by or associated with FTHMA-070, Tango85, Tango77, SPOIL, NEOKINE, Tango129 or A259 protein, nucleic acid expression or activity.

[0933] Another aspect of the invention provides methods for determining FTHMA-070, Tango85, Tango77, SPOIL, NEOKINE, Tango129 or A259 protein, nucleic acid expression or FTHMA-070, Tango85, Tango77, SPOIL, NEOKINE, Tango129 or A259 activity in an individual to thereby select appropriate therapeutic or prophylactic agents for that individual (referred to herein as “pharmacogenomics”). Pharmacogenomics allows for the selection of agents (e.g., drugs) for therapeutic or prophylactic treatment of an individual based on the genotype of the individual (e.g., the genotype of the individual examined to determine the ability of the individual to respond to a particular agent.)

[0934] Yet another aspect of the invention pertains to monitoring the influence of agents (e.g., drugs or other compounds) on the expression or activity of FTHMA-070, Tango85, Tango77, SPOIL, NEOKINE, Tango129 or A259 in clinical trials.

[0935] These and other agents are described in further detail in the following sections.

### FTHMA-070, Tango85, Tango77, SPOIL, NEOKINE, Tango129 or A259 Diagnostic Assays

[0936] An exemplary method for detecting the presence or absence of FTHMA-070, Tango85, Tango77, SPOIL, NEOKINE, Tango129 or A259 in a biological sample involves obtaining a biological sample from a test subject and contacting the biological sample with a compound or an agent capable of detecting FTHMA-070, Tango85, Tango77, SPOIL, NEOKINE, Tango129 or A259 protein or nucleic acid (e.g., mRNA, genomic DNA) that encodes FTHMA-070, Tango85, Tango77, SPOIL, NEOKINE, Tango129 or A259 protein such that the presence of FTHMA-070, Tango85, Tango77, SPOIL, NEOKINE, Tango129 or A259 is detected in the biological sample. A preferred agent for detecting FTHMA-070, Tango85, Tango77, SPOIL, NEOKINE, Tango129 or A259 mRNA or genomic DNA is a labeled nucleic acid probe capable of hybridizing to FTHMA-070, Tango85, Tango77, SPOIL, NEOKINE, Tango129 or A259 mRNA or genomic DNA. The nucleic acid probe can be, for example, a full-length FTHMA-070, Tango85, Tango77, SPOIL, NEOKINE, Tango 129 or A259 nucleic acid, such as the nucleic acid of SEQ ID NO:53, 55, 57, 58, 71, 73, 76, 80, 89, 101, 104, 112, 115, 118, 121, 124, 137, 139, 145, 146, 163 or 164, or the DNA insert of the plasmid deposited with ATCC as Accession Number 98751, or a portion thereof, such as an oligonucleotide of at least 15, 30, 50, 100, 250 or 500 nucleotides in length and sufficient to specifically hybridize under stringent conditions to FTHMA-070, Tango85, Tango77, SPOIL, NEOKINE, Tango129 or A259 mRNA or genomic DNA. Other suitable probes for use in the diagnostic assays of the invention are described herein.

[0937] A preferred agent for detecting FTHMA-070, Tango85, Tango77, SPOIL, NEOKINE, Tango129 or A259 protein is an antibody capable of binding to FTHMA-070, Tango85, Tango77, SPOIL, NEOKINE, Tango129 or A259 protein, preferably an antibody with a detectable label. Antibodies can be polyclonal, or more preferably, monoclonal. An intact antibody, or a fragment thereof (e.g., Fab or F(ab′)₂) can be used. The term “labeled”, with regard to the probe or antibody, is intended to encompass direct labeling of the probe or antibody by coupling (i.e., physically linking) a detectable substance to the probe or antibody, as well as indirect labeling of the probe or antibody by reactivity with another reagent that is directly labeled. Examples of indirect labeling include detection of a primary antibody using a fluorescently labeled secondary antibody and end-labeling of a DNA probe with biotin such that it can be detected with fluorescently labeled streptavidin. The term “biological sample” is intended to include tissues, cells and biological fluids isolated from a subject, as well as tissues, cells and fluids present within a subject. That is, the detection method of the invention can be used to detect FTHMA-070, Tango85, Tango77, SPOIL, NEOKINE, Tango129 or A259 mRNA, protein, or genomic DNA in a biological sample in vitro as well as in vivo. For example, in vitro techniques for detection of FTHMA-070, Tango85, Tango77, SPOIL, NEOKINE, Tango129 or A259 mRNA include Northern hybridizations and in situ hybridizations. In vitro techniques for detection of FTHMA-070, Tango85, Tango77, SPOIL, NEOKINE, Tango129 or A259 protein include enzyme linked immunosorbent assays (ELISAs), Western blots, immunoprecipitations and immunofluorescence. In vitro techniques for detection of FTHMA-070, Tango85, Tango77, SPOIL, NEOKINE, Tango129 or A259 genomic DNA include Southern hybridizations. Furthermore, in vivo techniques for detection of FTHMA-070, Tango85, Tango77, SPOIL, NEOKINE, Tango129 or A259 protein include introducing into a subject a labeled anti-FTHMA-070, Tango85, Tango77, SPOIL, NEOKINE, Tango129 or A259 antibody. For example, the antibody can be labeled with a radioactive marker whose presence and location in a subject can be detected by standard imaging techniques.

[0938] In one embodiment, the biological sample contains protein molecules from the test subject. Alternatively, the biological sample can contain mRNA molecules from the test subject or genomic DNA molecules from the test subject. A preferred biological sample is a peripheral blood leukocyte sample isolated by conventional means from a subject.

[0939] In another embodiment, the methods further involve obtaining a control biological sample from a control subject, contacting the control sample with a compound or agent capable of detecting FTHMA-070, Tango85, Tango77, SPOIL, NEOKINE, Tango129 or A259 protein, mRNA, or genomic DNA, such that the presence of FTHMA-070, Tango85, Tango77, SPOIL, NEOKINE, Tango129 or A259 protein, mRNA or genomic DNA is detected in the biological sample, and comparing the presence of FTHMA-070, Tango85, Tango77, SPOIL, NEOKINE, Tango129 or A259 protein, mRNA or genomic DNA in the control sample with the presence of FTHMA-070, Tango85, Tango77, SPOIL, NEOKINE, Tango129 or A259 protein, mRNA or genomic DNA in the test sample.

[0940] The invention also encompasses kits for detecting the presence of FTHMA-070, Tango85, Tango77, SPOIL, NEOKINE, Tango129 or A259 in a biological sample (a test sample). Such kits can be used to determine if a subject is suffering from or is at increased risk of developing a disorder associated with aberrant expression of FTHMA-070, Tango85, Tango77, SPOIL, NEOKINE, Tango129 or A259 (e.g., an immunological disorder or proliferative disorder, e.g., psoriasis or cancer). For example, the kit can comprise a labeled compound or agent capable of detecting FTHMA-070, Tango85, Tango77, SPOIL, NEOKINE, Tango129 or A259 protein or mRNA in a biological sample and means for determining the amount of FTHMA-070, Tango85, Tango77, SPOIL, NEOKINE, Tango129 or A259 in the sample (e.g., an anti-FTHMA-070, Tango85, Tango77, SPOIL, NEOKINE, Tango129 or A259 antibody or an oligonucleotide probe which binds to DNA encoding FTHMA-070, Tango85, Tango77, SPOIL, NEOKINE, Tango129 or A259). Kits may also include instruction for observing that the tested subject is suffering from or is at risk of developing a disorder associated with aberrant expression of FTHMA-070, Tango85, Tango77, SPOIL, NEOKINE, Tango129 or A259 if the amount of FTHMA-070, Tango85, Tango77, SPOIL, NEOKINE, Tango129 or A259 protein or mRNA is above or below a normal level.

[0941] For antibody-based kits, the kit may comprise, for example: (1) a first antibody (e.g., attached to a solid support) which binds to FTHMA-070, Tango85, Tango77, SPOIL, NEOKINE, Tango129 or A259 protein; and, optionally, (2) a second, different antibody which binds to FTHMA-070, Tango85, Tango77, SPOIL, NEOKINE, Tango129 or A259 protein or the first antibody and is conjugated to a detectable agent.

[0942] For oligonucleotide-based kits, the kit may comprise, for example: (1) a oligonucleotide, e.g., a detectably labelled oligonucleotide, which hybridizes to a FTHMA-070, Tango85, Tango77, SPOIL, NEOKINE, Tango129 or A259 nucleic acid sequence or (2) a pair of primers useful for amplifying a FTHMA-070, Tango85, Tango77, SPOIL, NEOKINE, Tango129 or A259 nucleic acid molecule;

[0943] The kit may also comprise, e.g., a buffering agent, a preservative, or a protein stabilizing agent. The kit may also comprise components necessary for detecting the detectable agent (e.g., an enzyme or a substrate). The kit may also contain a control sample or a series of control samples which can be assayed and compared to the test sample contained. Each component of the kit is usually enclosed within an individual container and all of the various containers are within a single package along with instructions for observing whether the tested subject is suffering from or is at risk of developing a disorder associated with aberrant expression of FTHMA-070, Tango85, Tango77, SPOIL, NEOKINE, Tango 129 or A259.

### FTHMA-070, Tango85, Tango77, SPOIL, NEOKINE, Tango129 or A259 Prognostic Assays

[0944] The methods described herein can furthermore be utilized as diagnostic or prognostic assays to identify subjects having or at risk of developing a disease or disorder associated with aberrant FTHMA-070, Tango85, Tango77 or Tango129 expression or activity. For example, the assays described herein, such as the preceding diagnostic assays or the following assays, can be utilized to identify a subject having or at risk of developing a disorder associated with FTHMA-070, Tango85, Tango77 or Tango129 protein, nucleic acid expression or activity such as an immune system disorder. Alternatively, the prognostic assays can be utilized to identify a subject having or at risk for developing such a disease or disorder. Thus, the present invention provides a method in which a test sample is obtained from a subject and FTHMA-070, Tango85, Tango77 or Tango129 protein or nucleic acid (e.g., mRNA, genomic DNA) is detected, wherein the presence of FTHMA-070, Tango85, Tango77 or Tango129 protein or nucleic acid is diagnostic for a subject having or at risk of developing a disease or disorder associated with aberrant FTHMA-070, Tango85, Tango77 or Tango129 expression or activity. As used herein, a “test sample” refers to a biological sample obtained from a subject of interest. For example, a test sample can be a biological fluid (e.g., serum), cell sample, or tissue.

[0945] The diagnostic methods described herein can furthermore be utilized to identify subjects having or at risk of developing a disease or disorder associated with aberrant SPOIL and/or IL-1 expression or activity. For example, the assays described herein, such as the preceding diagnostic assays or the following assays, can be utilized to identify a subject having or at risk of developing a disorder associated with aberrant SPOIL protein, nucleic acid expression or activity and/or characterized by aberrant IL-1 expression or activity such as an inflammatory disorder, an immune disorder, or a differentiative disorder (e.g., a bone metabolism disorder). Alternatively, the prognostic assays can be utilized to identify a subject having or at risk for developing a differentiative or proliferative disease (e.g., leukemia), an inflammatory disease, or an immune disease. Thus, the present invention provides a method for identifying a disease or disorder associated with aberrant SPOIL and/or IL-1 expression or activity in which a test sample is obtained from a subject and SPOIL protein or nucleic acid (e.g, mRNA, genomic DNA) is detected, wherein the presence of SPOIL protein or nucleic acid is diagnostic for a subject having or at risk of developing a disease or disorder characterized aberrant SPOIL and/or IL-1 expression or activity. As used herein, a “test sample” refers to a biological sample obtained from a subject of interest. For example, a test sample can be a biological fluid (e.g., serum), cell sample, or tissue.

[0946] The diagnostic methods described herein can furthermore be utilized to identify subjects having or at risk of developing a disease or disorder associated with aberrant NEOKINE expression or activity. For example, the assays described herein, such as the preceding diagnostic assays or the following assays, can be utilized to identify a subject having or at risk of developing a disorder associated with NEOKINE protein, nucleic acid expression or activity such as an inflammatory disorder. Alternatively, the prognostic assays can be utilized to identify a subject having or at risk for developing an inflammatory disorder. Thus, the present invention provides a method for identifying a disease or disorder associated with aberrant NEOKINE expression or activity in which a test sample is obtained from a subject and NEOKINE protein or nucleic acid (e.g, mRNA, genomic DNA) is detected, wherein the presence of NEOKINE protein or nucleic acid is diagnostic for a subject having or at risk of developing a disease or disorder associated with aberrant NEOKINE expression or activity. As used herein, a “test sample” refers to a biological sample obtained from a subject of interest. For example, a test sample can be a biological fluid (e.g., serum), cell sample, or tissue.

[0947] The methods described herein can furthermore be utilized as diagnostic or prognostic assays to identify subjects having or at risk of developing a disease or disorder associated with aberrant expression or activity of a A259 polypeptide of the invention. For example, the assays described herein, such as the preceding diagnostic assays or the following assays, can be utilized to identify a subject having or at risk of developing a disorder associated with aberrant expression or activity of a A259 polypeptide of the invention, e.g., an immunologic disorder, e.g., asthma, anaphylaxis, or atopic dermatitis. Alternatively, the prognostic assays can be utilized to identify a subject having or at risk for developing such a disease or disorder. Thus, the present invention provides a method in which a test sample is obtained from a subject and a A259 polypeptide or nucleic acid (e.g., mRNA, genomic DNA) of the invention is detected, wherein the presence of the A259 polypeptide or nucleic acid is diagnostic for a subject having or at risk of developing a disease or disorder associated with aberrant expression or activity of the A259 polypeptide. As used herein, a “test sample” refers to a biological sample obtained from a subject of interest. For example, a test sample can be a biological fluid (e.g., serum), cell sample, or tissue.

[0948] Furthermore, the prognostic assays described herein can be used to determine whether a subject can be administered an agent (e.g., an agonist, antagonist, peptidomimetic, protein, peptide, nucleic acid, small molecule, or other drug candidate) to treat a disease or disorder associated with aberrant FTHMA-070, Tango85, Tango77, SPOIL, NEOKINE, Tango129 or A259 expression or activity. For example, such methods can be used to determine whether a subject can be effectively treated with a specific agent or class of agents (e.g., agents of a type which decrease FTHMA-070, Tango85, Tango77, SPOIL, NEOKINE, Tango129 or A259 activity). Thus, the present invention provides methods for determining whether a subject can be effectively treated with an agent for a disorder associated with aberrant FTHMA-070, Tango85, Tango77, SPOIL, NEOKINE, Tango129 or A259 expression or activity in which a test sample is obtained and FTHMA-070, Tango85, Tango77, SPOIL, NEOKINE, Tango129 or A259 protein or nucleic acid is detected (e.g., wherein the presence of FTHMA-070, Tango85, Tango77, SPOIL, NEOKINE, Tango129 or A259 protein or nucleic acid is diagnostic for a subject that can be administered the agent to treat a disorder associated with aberrant FTHMA-070, Tango85, Tango77, SPOIL, NEOKINE, Tango129 or A259 expression or activity).

[0949] The methods of the invention can also be used to detect genetic lesions or mutations in a FTHMA-070, Tango85, Tango77, SPOIL, NEOKINE, Tango129 or A259 gene, thereby determining if a subject with the lesioned gene is at risk for a disorder characterized by aberrant cell proliferation and/or differentiation. In preferred embodiments, the methods include detecting, in a sample of cells from the subject, the presence or absence of a genetic lesion characterized by at least one of an alteration affecting the integrity of a gene encoding a FTHMA-070, Tango85, Tango77, SPOIL, NEOKINE, Tango129 or A259-protein, or the mis-expression of the FTHMA-070, Tango85, Tango77, SPOIL, NEOKINE, Tango129 or A259 gene. For example, such genetic lesions can be detected by ascertaining the existence of at least one of 1) a deletion of one or more nucleotides from a FTHMA-070, Tango85, Tango77, SPOIL, NEOKINE, Tango129 or A259 gene; 2) an addition of one or more nucleotides to a FTHMA-070, Tango85, Tango77, SPOIL, NEOKINE, Tango129 or A259 gene; 3) a substitution of one or more nucleotides of a FTHMA-070, Tango85, Tango77, SPOIL, NEOKINE, Tango129 or A259 gene, 4) a chromosomal rearrangement of a FTHMA-070, Tango85, Tango77, SPOIL, NEOKINE, Tango129 or A259 gene; 5) an alteration in the level of a messenger RNA transcript of a FTHMA-070, Tango85, Tango77, SPOIL, NEOKINE, Tango129 or A259 gene, 6) aberrant modification of a FTHMA-070, Tango85, Tango77, SPOIL, NEOKINE, Tango129 or A259 gene, such as of the methylation pattern of the genomic DNA, 7) the presence of a non-wild type splicing pattern of a messenger RNA transcript of a FTHMA-070, Tango85, Tango77, SPOIL, NEOKINE, Tango 129 or A259 gene, 8) a non-wild type level of a FTHMA-070, Tango85, Tango77, SPOIL, NEOKINE, Tango129 or A259-protein, 9) allelic loss of a FTHMA-070, Tango85, Tango77, SPOIL, NEOKINE, Tango129 or A259 gene, and 10) inappropriate post-translational modification of a FTHMA-070, Tango85, Tango77, SPOIL, NEOKINE, Tango129 or A259-protein. As described herein, there are a large number of assay techniques known in the art which can be used for detecting lesions in a FTHMA-070, Tango85, Tango77, SPOIL, NEOKINE, Tango129 or A259 gene. A preferred biological sample is a peripheral blood leukocyte sample isolated by conventional means from a subject.

[0950] In certain embodiments, detection of the lesion involves the use of a probe/primer in a polymerase chain reaction (PCR) (see, e.g., U.S. Pat. Nos. 4,683,195 and 4,683,202), such as anchor PCR or RACE PCR, or, alternatively, in a ligation chain reaction (LCR) (see, e.g., Landegran et al. (1988) Science 241:1077-1080; and Nakazawa et al. (1994) Proc. Nail. Acad. Sci. USA 91:360-364), the latter of which can be particularly useful for detecting point mutations in the FTHMA-070, Tango85, Tango77, SPOIL, NEOKINE, Tango129 or A259-gene (see Abravaya et al. (1995) Nucleic Acids Res. 23:675-682). This method can include the steps of collecting a sample of cells from a patient, isolating nucleic acid (e.g., genomic, mRNA or both) from the cells of the sample, contacting the nucleic acid sample with one or more primers which specifically hybridize to a FTHMA-070, Tango85, Tango77, SPOIL, NEOKINE, Tango129 or A259 gene under conditions such that hybridization and amplification of the FTHMA-070, Tango85, Tango77, SPOIL, NEOKINE, Tango129 or A259-gene (if present) occurs, and detecting the presence or absence of an amplification product, or detecting the size of the amplification product and comparing the length to a control sample. It is anticipated that PCR and/or LCR may be desirable to use as a preliminary amplification step in conjunction with any of the techniques used for detecting mutations described herein.

[0951] Alternative amplification methods include: self sustained sequence replication (Guatelli et al. (1990) Proc. Natl. Acad. Sci. USA 87:1874-1878), transcriptional amplification system (Kwoh, et al. (1989) Proc. Natl. Acad. Sci. USA 86:1173-1177), Q-Beta Replicase (Lizardi et al. (1988) Bio/Technology 6:1197), or any other nucleic acid amplification method, followed by the detection of the amplified molecules using techniques well known to those of skill in the art. These detection schemes are especially useful for the detection of nucleic acid molecules if such molecules are present in very low numbers.

[0952] In an alternative embodiment, mutations in a FTHMA-070, Tango85, Tango77, SPOIL, NEOKINE, Tango129 or A259 gene from a sample cell can be identified by alterations in restriction enzyme cleavage patterns. For example, sample and control DNA is isolated, amplified (optionally), digested with one or more restriction endonucleases, and fragment length sizes are determined by gel electrophoresis and compared. Differences in fragment length sizes between sample and control DNA indicates mutations in the sample DNA. Moreover, the use of sequence specific ribozymes (see, e.g., U.S. Pat. No. 5,498,531) can be used to score for the presence of specific mutations by development or loss of a ribozyme cleavage site.

[0953] In other embodiments, genetic mutations in FTHMA-070, Tango85, Tango77, SPOIL, NEOKINE, Tango129 or A259 can be identified by hybridizing a sample and control nucleic acids, e.g., DNA or RNA, to high density arrays containing hundreds or thousands of oligonucleotides probes (Cronin et al. (1996) Human Mutation 7:244-255; Kozal et al. (1996) Nature Medicine 2:753-759). For example, genetic mutations in FTHMA-070, Tango85, Tango77, SPOIL, NEOKINE, Tango129 or A259 can be identified in two-dimensional arrays containing light-generated DNA probes as described in Cronin et al. supra. Briefly, a first hybridization array of probes can be used to scan through long stretches of DNA in a sample and control to identify base changes between the sequences by making linear arrays of sequential overlapping probes. This step allows the identification of point mutations. This step is followed by a second hybridization array that allows the characterization of specific mutations by using smaller, specialized probe arrays complementary to all variants or mutations detected. Each mutation array is composed of parallel probe sets, one complementary to the wild-type gene and the other complementary to the mutant gene.

[0954] In yet another embodiment, any of a variety of sequencing reactions known in the art can be used to directly sequence the FTHMA-070, Tango85, Tango77, SPOIL, NEOKINE, Tango 129 or A259 gene and detect mutations by comparing the sequence of the sample FTHMA-070, Tango85, Tango77, SPOIL, NEOKINE, Tango129 or A259 with the corresponding wild-type (control) sequence. Examples of sequencing reactions include those based on techniques developed by Maxim and Gilbert ((1977) Proc. Natl. Acad. Sci. USA 74:560) or Sanger ((1977) Proc. Natl. Acad. Sci. USA 74:5463). It is also contemplated that any of a variety of automated sequencing procedures can be utilized when performing the diagnostic assays ((1995) Bio/Techniques 19:448), including sequencing by mass spectrometry (see, e.g., PCT Publication No. WO 94/16101; Cohen et al. (1996) Adv. Chromatogr. 36:127-162; and Griffin et al. (1993) Appl. Biochem. Biotechnol. 38:147-159).

[0955] Other methods for detecting mutations in the FTHMA-070, Tango85, Tango77, SPOIL, NEOKINE, Tango129 or A259 gene include methods in which protection from cleavage agents is used to detect mismatched bases in RNA/RNA or RNA/DNA heteroduplexes (Myers et al. (1985) Science 230:1242). In general, the art technique of “mismatch cleavage” starts by providing heteroduplexes of formed by hybridizing (labeled) RNA or DNA containing the wild-type FTHMA-070, Tango85, Tango77, SPOIL, NEOKINE, Tango129 or A259 sequence with potentially mutant RNA or DNA obtained from a tissue sample. The double-stranded duplexes are treated with an agent which cleaves single-stranded regions of the duplex such as which will exist due to basepair mismatches between the control and sample strands. For instance, RNA/DNA duplexes can be treated with RNase and DNA/DNA hybrids treated with S1 nuclease to enzymatically digesting the mismatched regions. In other embodiments, either DNA/DNA or RNA/DNA duplexes can be treated with hydroxylamine or osmium tetroxide and with piperidine in order to digest mismatched regions. After digestion of the mismatched regions, the resulting material is then separated by size on denaturing polyacrylamide gels to determine the site of mutation. See, e.g., Cotton et al (1988) Proc. Natl Acad Sci USA 85:4397; Saleeba et al (1992) Methods Enzymol. 217:286-295. In a preferred embodiment, the control DNA or RNA can be labeled for detection.

[0956] In still another embodiment, the mismatch cleavage reaction employs one or more proteins that recognize mismatched base pairs in double-stranded DNA (so called “DNA mismatch repair” enzymes) in defined systems for detecting and mapping point mutations in FTHMA-070, Tango85, Tango77, SPOIL, NEOKINE, Tango129 or A259 cDNAs obtained from samples of cells. For example, the mutY enzyme of E. coli cleaves A at G/A mismatches and the thymidine DNA glycosylase from HeLa cells cleaves T at G/T mismatches (Hsu et al. (1994) Carcinogenesis 15:1657-1662). According to an exemplary embodiment, a probe based on a FTHMA-070, Tango85, Tango77, SPOIL, NEOKINE, Tango129 or A259 sequence, e.g., a wild-type FTHMA-070, Tango85, Tango77, SPOIL, NEOKINE, Tango129 or A259 sequence, is hybridized to a cDNA or other DNA product from a test cell(s). The duplex is treated with a DNA mismatch repair enzyme, and the cleavage products, if any, can be detected from electrophoresis protocols or the like. See, e.g., U.S. Pat. No. 5,459,039.

[0957] In other embodiments, alterations in electrophoretic mobility will be used to identify mutations in FTHMA-070, Tango85, Tango77, SPOIL, NEOKINE, Tango129 or A259 genes. For example, single strand conformation polymorphism (SSCP) may be used to detect differences in electrophoretic mobility between mutant and wild type nucleic acids (Orita et al. (1989) Proc Natl. Acad. Sci. USA: 86:2766, see also Cotton (1993) Mutat. Res. 285:125-144; and Hayashi (1992) Genet Anal Tech Appl 9:73-79). Single-stranded DNA fragments of sample and control FTHMA-070, Tango85, Tango77, SPOIL, NEOKINE, Tango129 or A259 nucleic acids will be denatured and allowed to renature. The secondary structure of single-stranded nucleic acids varies according to sequence, the resulting alteration in electrophoretic mobility enables the detection of even a single base change. The DNA fragments may be labeled or detected with labeled probes. The sensitivity of the assay may be enhanced by using RNA (rather than DNA), in which the secondary structure is more sensitive to a change in sequence. In a preferred embodiment, the subject method utilizes heteroduplex analysis to separate double stranded heteroduplex molecules on the basis of changes in electrophoretic mobility (Keen et al. (1991) Trends Genet 7:5).

[0958] In yet another embodiment, the movement of mutant or wild-type fragments in polyacrylamide gels containing a gradient of denaturant is assayed using denaturing gradient gel electrophoresis (DGGE) (Myers et al. (1985) Nature 313:495). When DGGE is used as the method of analysis, DNA will be modified to insure that it does not completely denature, for example by adding a GC clamp of approximately 40 bp of high-melting GC-rich DNA by PCR. In a further embodiment, a temperature gradient is used in place of a denaturing gradient to identify differences in the mobility of control and sample DNA (Rosenbaum and Reissner (1987) Biophys Chem 265:12753).

[0959] Examples of other techniques for detecting point mutations include, but are not limited to, selective oligonucleotide hybridization, selective amplification, or selective primer extension. For example, oligonucleotide primers may be prepared in which the known mutation is placed centrally and then hybridized to target DNA under conditions which permit hybridization only if a perfect match is found (Saiki et al. (1986) Nature 324:163); Saiki et al. (1989) Proc. Natl. Acad. Sci. USA 86:6230). Such allele specific oligonucleotides are hybridized to PCR amplified target DNA or a number of different mutations when the oligonucleotides are attached to the hybridizing membrane and hybridized with labeled target DNA.

[0960] Alternatively, allele specific amplification technology which depends on selective PCR amplification may be used in conjunction with the instant invention. Oligonucleotides used as primers for specific amplification may carry the mutation of interest in the center of the molecule (so that amplification depends on differential hybridization) (Gibbs et al. (1989) Nucleic Acids Res. 17:2437-2448) or at the extreme 3′ end of one primer where, under appropriate conditions, mismatch can prevent, or reduce polymerase extension (Prossner (1993) Tibtech 11:238). In addition, it may be desirable to introduce a novel restriction site in the region of the mutation to create cleavage-based detection (Gasparini et al. (1992) Mol. Cell. Probes 6:1). It is anticipated that in certain embodiments amplification may also be performed using Taq ligase for amplification (Barany (1991) Proc. Natl. Acad. Sci. USA 88:189). In such cases, ligation will occur only if there is a perfect match at the 3′ end of the 5′ sequence making it possible to detect the presence of a known mutation at a specific site by looking for the presence or absence of amplification.

[0961] The methods described herein may be performed, for example, by utilizing pre-packaged diagnostic kits comprising at least one probe nucleic acid or antibody reagent described herein, which may be conveniently used, e.g., in clinical settings to diagnose patients exhibiting symptoms or family history of a disease or illness involving a FTHMA-070, Tango85, Tango77, SPOIL, NEOKINE, Tango129 or A259 gene.

[0962] Furthermore, any cell type or tissue, e.g., chondrocytes, or peripheral blood leukocytes, in which FTHMA-070, Tango85, Tango77, SPOIL, NEOKINE, Tango129 or A259 is expressed may be utilized in the prognostic assays described herein.

### FTHMA-070, Tango85, Tango77, SPOIL, NEOKINE, Tango129 or A259 Pharmacogenomics

[0963] Agents, or modulators which have a stimulatory or inhibitory effect on FTHMA-070, T85 or A259 activity (e.g., FTHMA-070, T85 or A259 gene expression) as identified by a screening assay described herein can be administered to individuals to treat (prophylactically or therapeutically) disorders (e.g., an immunological disorder) associated with aberrant FTHMA-070, T85 or A259 activity. Agents, or modulators which have a stimulatory or inhibitory effect on Tango-77 activity (e.g., Tango-77 gene expression) as identified by a screening assay described herein can be administered to individuals to treat (prophylactically or therapeutically) disorders (e.g., acute or chronic inflammation and asthma) associated with aberrant Tango-77 activity. The SPOIL molecules of the present invention or SPOIL modulators as identified by a screening assay described herein can be administered to individuals to treat (prophylactically or therapeutically) disorders (e.g, inflammatory or developmental disorders) associated with aberrant SPOIL and/or IL-1 activity. The NEOKINE molecules of the present invention, as well as agents, or modulators which have a stimulatory or inhibitory effect on NEOKINE activity (e.g., NEOKINE gene expression) as identified by a screening assay described herein can be administered to individuals to treat (prophylactically or therapeutically) disorders (e.g, inflammatory disorders) associated with aberrant NEOKINE activity. Agents, or modulators which have a stimulatory or inhibitory effect on T129 activity (e.g., T129 gene expression) as identified by a screening assay described herein can be administered to individuals to treat (prophylactically or therapeutically) disorders (e.g., an immunological disorder) associated with aberrant T129 activity. In conjunction with such treatment, the pharmacogenomics (i.e., the study of the relationship between an individual's genotype and that individual's response to a foreign compound or drug) of the individual may be considered. Differences in metabolism of therapeutics can lead to severe toxicity or therapeutic failure by altering the relation between dose and blood concentration of the pharmacologically active drug. Thus, the pharmacogenomics of the individual permits the selection of effective agents (e.g., drugs) for prophylactic or therapeutic treatments based on a consideration of the individual's genotype. Such pharmacogenomics can further be used to determine appropriate dosages and therapeutic regimens. Accordingly, the activity of FTHMA-070, Tango85, Tango77, SPOIL, NEOKINE, Tango129 or A259 protein, expression of FTHMA-070, Tango85, Tango77, SPOIL, NEOKINE, Tango129 or A259 nucleic acid, or mutation content of FTHMA-070, Tango85, Tango77, SPOIL, NEOKINE, Tango129 or A259 genes in an individual can be determined to thereby select appropriate agent(s) for therapeutic or prophylactic treatment of the individual.

[0964] Pharmacogenomics deals with clinically significant hereditary variations in the response to drugs due to altered drug disposition and abnormal action in affected persons. See, e.g., Linder (1997) Clin. Chem. 43(2):254-266. In general, two types of pharmacogenetic conditions can be differentiated. Genetic conditions transmitted as a single factor altering the way drugs act on the body (altered drug action) or genetic conditions transmitted as single factors altering the way the body acts on drugs (altered drug metabolism). These pharmacogenetic conditions can occur either as rare defects or as polymorphisms. For example, glucose-6-phosphate dehydrogenase deficiency (G6PD) is a common inherited enzymopathy in which the main clinical complication is haemolysis after ingestion of oxidant drugs (anti-malarials, sulfonamides, analgesics, nitrofurans) and consumption of fava beans.

[0965] One pharmacogenomics approach to identifying genes that predict drug response, known as “a genome-wide association”, relies primarily on a high-resolution map of the human genome consisting of already known gene-related markers (e.g., a “bi-allelic” gene marker map which consists of 60,000-100,000 polymorphic or variable sites on the human genome, each of which has two variants). Such a high-resolution genetic map can be compared to a map of the genome of each of a statistically significant number of patients taking part in a Phase II/III drug trial to identify markers associated with a particular observed drug response or side effect. Alternatively, such a high resolution map can be generated from a combination of some ten-million known single nucleotide polymorphisms (SNPs) in the human genome. As used herein, a “SNP” is a common alteration that occurs in a single nucleotide base in a stretch of DNA. For example, a SNP may occur once per every 1000 bases of DNA. A SNP may be involved in a disease process, however, the vast majority may not be disease-associated. Given a genetic map based on the occurrence of such SNPs, individuals can be grouped into genetic categories depending on a particular pattern of SNPs in their individual genome. In such a manner, treatment regimens can be tailored to groups of genetically similar individuals, taking into account traits that may be common among such genetically similar individuals.

[0966] Alternatively, a method termed the “candidate gene approach”, can be utilized to identify genes that predict drug response. According to this method, if a gene that encodes a drug target is known (e.g., a SPOIL or NEOKINE protein or SPOIL or NEOKINE receptor of the present invention), all common variants of that gene can be identified in the population and a particular drug response can be associated with one or more genes.

[0967] As an illustrative embodiment, the activity of drug metabolizing enzymes is a major determinant of both the intensity and duration of drug action. The discovery of genetic polymorphisms of drug metabolizing enzymes (e.g., N-acetyltransferase 2 (NAT 2) and cytochrome P450 enzymes CYP2D6 and CYP2C19) has provided an explanation as to why some patients do not obtain the expected drug effects or show exaggerated drug response and serious toxicity after taking the standard and safe dose of a drug. These polymorphisms are expressed in two phenotypes in the population, the extensive metabolizer (EM) and poor metabolizer (PM). The prevalence of PM is different among different populations. For example, the gene coding for CYP2D6 is highly polymorphic and several mutations have been identified in PM, which all lead to the absence of functional CYP2D6. Poor metabolizers of CYP2D6 and CYP2C19 quite frequently experience exaggerated drug response and side effects when they receive standard doses. If a metabolite is the active therapeutic moiety, PM show no therapeutic response, as demonstrated for the analgesic effect of codeine mediated by its CYP2D6-formed metabolite morphine. The other extreme are the so called ultra-rapid metabolizers who do not respond to standard doses. Recently, the molecular basis of ultra-rapid metabolism has been identified to be due to CYP2D6 gene amplification.

[0968] Alternatively, a method termed the “gene expression profiling”, can be utilized to identify genes that predict drug response. For example, the gene expression of an animal dosed with a drug (e.g., a SPOIL or NEOKINE molecule or SPOIL or NEOKINE modulator of the present invention) indicate whether gene pathways related to toxicity have been turned on.

[0969] Information generated from more than one of the above pharmacogenomics approaches can be used to determine appropriate dosage and treatment regimens for prophylactic or therapeutic treatment an individual. This knowledge, when applied to dosing or drug selection, can avoid adverse reactions or therapeutic failure and thus enhance therapeutic or prophylactic efficiency when treating a subject with a SPOIL or NEOKINE molecule or SPOIL or NEOKINE modulator, such as a modulator identified by one of the exemplary screening assays described herein.

[0970] Thus, the activity of FTHMA-070, Tango85, Tango77, SPOIL, NEOKINE, Tango129 or A259 protein, expression of FTHMA-070, Tango85, Tango77, SPOIL, NEOKINE, Tango129 or A259 nucleic acid, or mutation content of FTHMA-070, Tango85, Tango77, SPOIL, NEOKINE, Tango129 or A259 genes in an individual can be determined to thereby select appropriate agent(s) for therapeutic or prophylactic treatment of the individual. In addition, pharmacogenetic studies can be used to apply genotyping of polymorphic alleles encoding drug-metabolizing enzymes to the identification of an individual's drug responsiveness phenotype. This knowledge, when applied to dosing or drug selection, can avoid adverse reactions or therapeutic failure and thus enhance therapeutic or prophylactic efficiency when treating a subject with a FTHMA-070, Tango85, Tango77, SPOIL, NEOKINE, Tango129 or A259 modulator, such as a modulator identified by one of the exemplary screening assays described herein.

### FTHMA-070, Tango85, Tango77, SPOIL, NEOKINE, Tango129 or A259 Monitoring of Effects During Clinical Trials

[0971] Monitoring the influence of agents (e.g., drugs, compounds) on the expression or activity of FTHMA-070 or T85 (e.g., the ability to modulate aberrant cell proliferation and/or differentiation) can be applied not only in basic drug screening, but also in clinical trials. For example, the effectiveness of an agent determined by a screening assay as described herein to increase FTHMA-070 or T85 gene expression, protein levels, or upregulate FTHMA-070 or T85 activity, can be monitored in clinical trails of subjects exhibiting decreased FTHMA-070 or T85 gene expression, protein levels, or downregulated FTHMA-070 or T85 activity. Alternatively, the effectiveness of an agent determined by a screening assay to decrease FTHMA-070 or T85 gene expression, protein levels, or downregulated FTHMA-070 or T85 activity, can be monitored in clinical trails of subjects exhibiting increased FTHMA-070 or T85 gene expression, protein levels, or upregulated FTHMA-070 or T85 activity. In such clinical trials, the expression or activity of FTHMA-070 or T85 and, preferably, other genes that have been implicated in, for example, a cellular proliferation disorder can be used as a “read out” or markers of the immune responsiveness of a particular cell.

[0972] Monitoring the influence of agents (e.g., drugs, compounds) on the expression or activity of Tango-77 (e.g., the ability to modulate aberrant inflammation) can be applied not only in basic drug screening, but also in clinical trials. For example, the effectiveness of an agent, as determined by a screening assay as described herein, to increase Tango-77 gene expression, increase protein levels, or upregulate Tango-77 activity, can be monitored in clinical trials of subjects exhibiting decreased Tango-77 gene expression, decreased protein levels, or downregulated Tango-77 activity. Alternatively, the effectiveness of an agent, as determined by a screening assay, to decrease Tango-77 gene expression, decrease protein levels, or downregulate Tango-77 activity, can be monitored in clinical trials of subjects exhibiting increased Tango-77 gene expression, increased protein levels, or upregulated Tango-77 activity.

[0973] Monitoring the influence of SPOIL agents (e.g., modulatory agents and/or SPOIL proteins) on the expression or activity of SPOIL and/or IL-1 (e.g., modulation of signal transduction, modulation of cell development or differentiation, regulation of cellular proliferation) can be applied not only in basic drug screening, but also in clinical trials. For example, the effectiveness of an agent determined by a screening assay (as described herein) to modulate SPOIL and/or IL-1 expression or activity can be monitored in clinical trails of subjects exhibiting increased SPOIL and/or IL-1 expression or activity and/or decreased SPOIL and/or IL-1 gene expression, protein levels or activity. Alternatively, the effectiveness of an agent determined by a screening assay to increase SPOIL and/or IL-1 expression or activity and/or downregulate SPOIL and/or IL-1 gene expression, protein levels or activity, can be monitored in clinical trails of subjects exhibiting increased SPOIL and/or IL-1 expression or activity and/or decreased SPOIL and/or IL-1 gene expression, protein levels or activity. In such clinical trials, the expression or activity of SPOIL and/or IL-1 and, preferably, other genes that have been implicated in, for example, a proinflammatory disorder, an immune disorder, or a bone metabolism disorder can be used as a “read out” or markers of the phenotype of a particular cell.

[0974] Monitoring the influence of agents (e.g., drugs, compounds) on the expression or activity of a NEOKINE protein (e.g., modulation of angiogenesis or of an inflammatory response) an be applied not only in basic drug screening, but also in clinical trials. For example, the effectiveness of an agent determined by a screening assay as described herein to increase NEOKINE gene expression, protein levels, or upregulate NEOKINE activity, can be monitored in clinical trials of subjects exhibiting decreased NEOKINE gene expression, protein levels, or downregulated NEOKINE activity. Alternatively, the effectiveness of an agent determined by a screening assay to decrease NEOKINE gene expression, protein levels, or downregulate NEOKINE activity, can be monitored in clinical trials of subjects exhibiting increased NEOKINE gene expression, protein levels, or upregulated NEOKINE activity. In such clinical trials, the expression or activity of a NEOKINE gene, and preferably, other genes that have been implicated in, for example, an inflammatory disorder can be used as a “read out” or markers of the phenotype of a particular cell.

[0975] Monitoring the influence of agents (e.g., drugs, compounds) on the expression or activity of T129 or A259 (e.g., the ability to modulate aberrant cell proliferation and/or differentiation) can be applied not only in basic drug screening, but also in clinical trials. For example, the effectiveness of an agent determined by a screening assay as described herein to increase T129 or A259 gene expression, protein levels, or upregulate T129 or A259 activity, can be monitored in clinical trails of subjects exhibiting decreased T129 or A259 gene expression, protein levels, or downregulated T129 or A259 activity. Alternatively, the effectiveness of an agent determined by a screening assay to decrease T129 or A259 gene expression, protein levels, or downregulated T129 or A259 activity, can be monitored in clinical trails of subjects exhibiting increased T129 or A259 gene expression, protein levels, or upregulated T129 or A259 activity. In such clinical trials, the expression or activity of T129 or A259 and, preferably, other genes that have been implicated in, for example, a cellular proliferation disorder can be used as a “read out” or markers of the immune responsiveness of a particular cell.

[0976] For example, and not by way of limitation, genes, including FTHMA-070, Tango85, Tango77, SPOIL, NEOKINE, Tango129 or A259, that are modulated in cells by treatment with an agent (e.g., compound, drug or small molecule) which modulates FTHMA-070, Tango85, Tango77, SPOIL, NEOKINE, Tango129 or A259 activity (e.g., identified in a screening assay as described herein) can be identified. Thus, to study the effect of agents on cellular proliferation disorders, proinflammatory disorders, or developmental or differentiative disorders (e.g., a bone metabolism disorder) for example, in a clinical trial, cells can be isolated and RNA prepared and analyzed for the levels of expression of FTHMA-070, Tango85, Tango77, SPOIL, NEOKINE, Tango129 or A259 and other genes implicated in the disorder. The levels of gene expression (i.e., a gene expression pattern) can be quantified by Northern blot analysis or RT-PCR, as described herein, or alternatively by measuring the amount of protein produced, by one of the methods as described herein, or by measuring the levels of activity of FTHMA-070, Tango85, Tango77, SPOIL, NEOKINE, Tango129 or A259 or other genes. In this way, the gene expression pattern can serve as a marker, indicative of the physiological response of the cells to the agent. Accordingly, this response state may be determined before, and at various points during, treatment of the individual with the agent.

[0977] In a preferred embodiment, the present invention provides a method for monitoring the effectiveness of treatment of a subject with an agent (e.g., an agonist, antagonist, peptidomimetic, protein, peptide, nucleic acid, small molecule, or other drug candidate identified by the screening assays described herein) comprising the steps of (i) obtaining a pre-administration sample from a subject prior to administration of the agent; (ii) detecting the level of expression of a FTHMA-070, Tango85, Tango77, SPOIL, NEOKINE, Tango129 or A259 protein, mRNA, or genomic DNA in the preadministration sample; (iii) obtaining one or more post-administration samples from the subject; (iv) detecting the level of expression or activity of the FTHMA-070, Tango85, Tango77, SPOIL, NEOKINE, Tango129 or A259 protein, mRNA, or genomic DNA in the post-administration samples; (v) comparing the level of expression or activity of the FTHMA-070, Tango85, Tango77, SPOIL, NEOKINE, Tango129 or A259 protein, mRNA, or genomic DNA in the pre-administration sample with the FTHMA-070, Tango85, Tango77, SPOIL, NEOKINE, Tango129 or A259 protein, mRNA, or genomic DNA in the post administration sample or samples; and (vi) altering the administration of the agent to the subject accordingly. For example, increased administration of the agent may be desirable to increase the expression or activity of FTHMA-070, Tango85, Tango77, SPOIL, NEOKINE, Tango129 or A259 to higher levels than detected, i.e., to increase the effectiveness of the agent. Alternatively, decreased administration of the agent may be desirable to decrease expression or activity of FTHMA-070, Tango85, Tango77, SPOIL, NEOKINE, Tango129 or A259 to lower levels than detected, i.e., to decrease the effectiveness of the agent.

### FTHMA-070, Tango85, Tango77, SPOIL, NEOKINE, Tango129 or A259 Methods of Treatment

[0978] The present invention provides for both prophylactic and therapeutic methods of treating a subject at risk of (or susceptible to) a disorder or having a disorder associated with aberrant FTHMA-070, Tango85, SPOIL or NEOKINE expression or activity.

[0979] The present invention provides for both prophylactic and therapeutic methods of treating a subject at risk of (or susceptible to) developing or having a disorder associated with aberrant Tango-77 expression or activity. Alternatively, disorders associated with aberrant IL-1 production can be treated with Tango-77. Such disorders include acute and chronic inflammation, asthma, some classes of arthritis, autoimmune diabetes, systemic lupus erythematosus and inflammatory bowel disease.

[0980] The present invention provides for both prophylactic and therapeutic methods of treating a subject at risk of (or susceptible to) a disorder or having a disorder associated with aberrant T129 expression or activity. Such disorders include immunological disorders, e.g., disorders associated with abnormal lymphoid and/or thymic development, T-cell mediated immune response, T-cell dependent help for B cells, and abnormal humoral B cell activity, and, possibly, disorders of the skeletal muscle.

[0981] The present invention provides for both prophylactic and therapeutic methods of treating a subject at risk of (or susceptible to) a disorder or having a disorder associated with aberrant A259 expression or activity of a polypeptide of the invention. For example, disorders characterized by aberrant A259 expression or activity of the polypeptides of the invention include immunologic disorders. In addition, the A259 nucleic acids, polypeptides, and modulators thereof of the invention can be used to treat immunologic diseases and disorders, including but not limited to inflammatory disorders (e.g., atopic dermatitis). A259 polypeptides of the invention can also treat diseases associated and bone and cartilage degenerative diseases and disorders (e.g., arthritis, e.g., rheumatoid arthritis), as well as other disorders described herein.

### Prophylactic Methods

[0982] In one aspect, the invention provides a method for preventing in a subject, a disease or condition associated with an aberrant FTHMA-070, Tango85, Tango77, SPOIL, NEOKINE, Tango129 or A259 expression or activity, by administering to the subject an agent which modulates FTHMA-070, Tango85, Tango77, SPOIL, NEOKINE, Tango129 or A259 expression or at least one FTHMA-070, Tango85, Tango77, SPOIL, NEOKINE, Tango129 or A259 activity. Subjects at risk for a disease which is caused or contributed to by aberrant FTHMA-070, Tango85, Tango77, NEOKINE, Tango129 or A259 expression or activity can be identified by, for example, any or a combination of diagnostic or prognostic assays as described herein. Administration of a prophylactic agent can occur prior to the manifestation of symptoms characteristic of the FTHMA-070, Tango85, Tango77, SPOIL, NEOKINE, Tango129 or A259 aberrancy, such that a disease or disorder is prevented or, alternatively, delayed in its progression. Depending on the type of FTHMA-070, Tango85, Tango77, SPOIL, NEOKINE, Tango129 or A259 aberrancy, for example, a FTHMA-070, Tango85, Tango77, SPOIL, NEOKINE, Tango129 or A259 agonist or FTHMA-070, Tango85, Tango77, SPOIL, NEOKINE, Tango129 or A259 antagonist agent can be used for treating the subject. The appropriate agent can be determined based on screening assays described herein. For example, an antagonist of an A259 protein may be used to treat an arthropathic disorder, e.g., rheumatoid arthritis. The appropriate agent can be determined based on screening assays described herein.

### Therapeutic Methods

[0983] Another aspect of the invention pertains to methods of modulating FTHMA-070, Tango85, Tango77, Tango129 or A259 expression or activity for therapeutic purposes. The modulatory method of the invention involves contacting a cell with an agent that modulates one or more of the activities of FTHMA-070, Tango85, Tango77, Tango129 or A259 protein activity associated with the cell. An agent that modulates FTHMA-070, Tango85, Tango77, Tango129 or A259 protein activity can be an agent as described herein, such as a nucleic acid or a protein, a naturally-occurring cognate ligand of a FTHMA-070, Tango85, Tango77, Tango129 or A259 protein, a peptide, a FTHMA-070, Tango85, Tango77, Tango129 or A259 peptidomimetic, or other small molecule. In one embodiment, the agent stimulates one or more of the biological activities of FTHMA-070, Tango85, Tango77, Tango129 or A259 protein. Examples of such stimulatory agents include active FTHMA-070, Tango85, Tango77, Tango129 or A259 protein and a nucleic acid molecule encoding FTHMA-070, Tango85, Tango77, Tango129 or A259 that has been introduced into the cell. In another embodiment, the agent inhibits one or more of the biological activities of FTHMA-070, Tango85, Tango77, Tango129 or A259 protein. Examples of such inhibitory agents include antisense FTHMA-070, Tango85, Tango77, Tango129 or A259 nucleic acid molecules and anti-FTHMA-070, Tango85, Tango77, Tango129 or A259 antibodies. These modulatory methods can be performed in vitro (e.g., by culturing the cell with the agent) or, alternatively, in vivo (e.g, by administering the agent to a subject). As such, the present invention provides methods of treating an individual afflicted with a disease or disorder characterized by aberrant expression or activity of a FTHMA-070, Tango85, Tango77, Tango129 or A259 protein or nucleic acid molecule. In one embodiment, the method involves administering an agent (e.g., an agent identified by a screening assay described herein), or combination of agents that modulates (e.g., upregulates or down-regulates) FTHMA-070, Tango85, Tango77, Tango129 or A259 expression or activity. In another embodiment, the method involves administering a FTHMA-070, Tango85, Tango77, Tango129 or A259 protein or nucleic acid molecule as therapy to compensate for reduced or aberrant FTHMA-070, Tango85, Tango77, Tango129 or A259 expression or activity.

[0984] Another aspect of the invention pertains to methods of modulating SPOIL and/or IL-1 expression or activity for therapeutic purposes. The modulatory method of the invention involves contacting a cell with an agent that modulates one or more of the activities of SPOIL and/or IL-1 associated with the cell or one or more of the activities involved in inflammation, immune response, or bone turnover. An agent that modulates SPOIL and/or IL-1 activity can be an agent as described herein, such as a SPOIL modulator, a nucleic acid encoding a SPOIL protein or a SPOIL protein, a SPOIL peptide, or SPOIL peptidomimetic. In one embodiment, the agent stimulates one or more SPOIL and/or IL-1 protein activity. Examples of such stimulatory agents include SPOIL variants which have SPOIL receptor and/or IL-1 receptor agonist function or a nucleic acid molecule encoding such a SPOIL variant that has been introduced into a cell. In another embodiment, the agent inhibits one or more SPOIL and/or IL-1 activity. Examples of such inhibitory agents include SPOIL proteins and nucleic acid molecules, mutant SPOIL proteins and nucleic acid molecules, antisense SPOIL nucleic acid molecules and SPOIL antibodies. These modulatory methods can be performed in vitro (e.g., by culturing the cell with the agent) or, alternatively, in vivo (e.g, by administering the agent to a subject). As such, the present invention provides methods of treating an individual afflicted with a disease or disorder characterized by aberrant SPOIL and/or IL-1 expression or activity. In one embodiment, the method involves administering a SPOIL agent (e.g., an agent described herein), or combination of agents that modulates (e.g., upregulates or downregulates) SPOIL and/or IL-1 expression or activity. In another embodiment, the method involves administering a SPOIL protein or nucleic acid molecule as therapy to compensate for reduced SPOIL expression or activity.

[0985] Another aspect of the invention pertains to methods of modulating NEOKINE or chemokine expression or activity for therapeutic purposes. It has been determined that NEOKINE-1 is strongly expressed in the kidney. This expression of NEOKINE-1 indicates that the NEOKINES have utility in treating kidney inflammation, a major cause of renal failure in chronic and acute renal failure and transplantation. It is known in the art that expression of chemokines in the kidney is not only correlated with inflammation pathology, but also that blocking chemokine action by anti-chemokine antibodies limits or halts progression of the inflammation and resulting tissue damage. The fact that normal human kidney expresses abundant NEOKINE transcript suggests that the kidney makes significant quantities of the protein and that therefore the pro-inflammatory activity low or non-existent. This is consistent with the proposed natural antagonist function of the NEOKINE proteins. Furthermore, signal peptide cleavage prediction on NEOKINE implies that the mature protein will have only two residues before the first cysteine. In an analogous situation, an artificially truncated form of IL-8 with only one residue before the first cysteine instead of the naturally-occurring 6 residues converts the protein from an agonist to an antagonist.

[0986] Accordingly, in an exemplary embodiment, the modulatory method of the invention involves contacting a cell with a NEOKINE such that the activity of a chemokine is modulated. Alternatively, the modulatory method of the invention involves contacting a cell with a NEOKINE or agent that modulates one or more of the activities of NEOKINE protein activity associated with the cell. An agent that modulates NEOKINE protein activity can be an agent as described herein, such as a nucleic acid or a protein, a naturally-occurring target molecule of a NEOKINE protein (e.g., a carbohydrate), a NEOKINE antibody, a NEOKINE agonist or antagonist, a peptidomimetic of a NEOKINE agonist or antagonist, or other small molecule. In one embodiment, the agent stimulates one or more NEOKINE activities. Examples of such stimulatory agents include active NEOKINE protein and a nucleic acid molecule encoding NEOKINE that has been introduced into the cell. In another embodiment, the agent inhibits one or more NEOKINE activities. Examples of such inhibitory agents include antisense NEOKINE nucleic acid molecules and anti-NEOKINE antibodies. These modulatory methods can be performed in vitro (e.g., by culturing the cell with the agent) or, alternatively, in vivo (e.g, by administering the agent to a subject). As such, the present invention provides methods of treating an individual afflicted with a disease or disorder characterized by aberrant expression or activity of a NEOKINE protein or nucleic acid molecule. Alternatively, the present invention provides methods of treating an individual afflicted with a disease or disorder characterized by aberrant expression or activity of a chemokine. In one embodiment, the method involves administering an agent (e.g., an agent identified by a screening assay described herein), or combination of agents that modulates (e.g., upregulates or downregulates) NEOKINE expression or activity or the expression or activity of a chemokine. In another embodiment, the method involves administering a NEOKINE protein or nucleic acid molecule as therapy to compensate for reduced or aberrant NEOKINE expression or activity. In another embodiment, the method involves administering a NEOKINE protein or nucleic acid molecule as therapy to compensate for reduced or aberrant chemokine expression or activity.

[0987] A preferred embodiment of the present invention involves a method for treatment of a SPOIL or NEOKINE associated disease or disorder which includes the step of administering a therapeutically effective amount of a SPOIL or NEOKINE antibody to a subject. As defined herein, a therapeutically effective amount of antibody (i.e., an effective dosage) ranges from about 0.001 to 30 mg/kg body weight, preferably about 0.01 to 25 mg/kg body weight, more preferably about 0.1 to 20 mg/kg body weight, and even more preferably about 1 to 10 mg/kg, 2 to 9 mg/kg, 3 to 8 mg/kg, 4 to 7 mg/kg, or 5 to 6 mg/kg body weight. The skilled artisan will appreciate that certain factors may influence the dosage required to effectively treat a subject, including but not limited to the severity of the disease or disorder, previous treatments, the general health and/or age of the subject, and other diseases present. Moreover, treatment of a subject with a therapeutically effective amount of an antibody can include a single treatment or, preferably, can include a series of treatments. In a preferred example, a subject is treated with antibody in the range of between about 0.1 to 20 mg/kg body weight, one time per week for between about 1 to 10 weeks, preferably between 2 to 8 weeks, more preferably between about 3 to 7 weeks, and even more preferably for about 4, 5, or 6 weeks. It will also be appreciated that the effective dosage of antibody used for treatment may increase or decrease over the course of a particular treatment. Changes in dosage may result from the results of diagnostic assays as described herein.

[0988] Stimulation of FTHMA-070, Tango85, Tango77, Tango129 or A259 activity is desirable in situations in which FTHMA-070, Tango85, Tango77, Tango129 or A259 is abnormally downregulated and/or in which increased FTHMA-070, Tango85, Tango77, Tango129 or A259 activity is likely to have a beneficial effect. Conversely, inhibition of FTHMA-070, Tango85, Tango77, Tango129 or A259 activity is desirable in situations in which FTHMA-070, Tango85, Tango77, Tango129 or A259 is abnormally upregulated and/or in which decreased FTHMA-070, Tango85, Tango77, Tango129 or A259 activity is likely to have a beneficial effect.

[0989] Stimulation of expression or activity is desirable in situations in which SPOIL and/or IL-1 is abnormally downregulated and/or in which increased expression or activity is likely to have a beneficial effect. Likewise, inhibition of expression or activity is desirable in situations in which SPOIL and/or IL-1 is abnormally upregulated and/or in which decreased expression or activity is likely to have a beneficial effect. One example of such a situation is where a subject has a disorder characterized by aberrant cellular differentiation (e.g., a bone resorption disorder). Another example of such a situation is where the subject has a proinflammatory disorder (e.g., sepsis) characterized by an aberrant SPOIL and/or IL-1 response.

[0990] Stimulation of NEOKINE activity is desirable in situations in which NEOKINE is abnormally downregulated and/or in which increased NEOKINE activity is likely to have a beneficial effect. For example, stimulation of NEOKINE activity is desirable in situations in which a chemokine is upregulated and/or in which increased NEOKINE activity is likely to have a beneficial effect (e.g., a situation is where a subject has a disorder characterized by aberrant angiogenesis or inflammation, such as kidney inflammation. Likewise, inhibition of NEOKINE activity is desirable in situations in which NEOKINE is abnormally upregulated and/or in which decreased NEOKINE activity is likely to have a beneficial effect.

### Delta3 Diagnostic and Prognostic Assays

[0991] The present methods provides means for determining if a subject is at risk of developing a disorder characterized by an aberrant Delta3 activity, such as aberrant cell proliferation, degeneration, and/or differentiation resulting for example in a neurodegenerative disease or cancer. The invention also provides methods for determining whether a subject is at risk of developing a disease or disorder associated with one or more specific alleles of a Delta3 gene. In fact, specific Delta3 alleles may be associated with specific diseases or disorders. For example, at least one allele of hDelta3 is likely to be associated with the neurological disease ACCPN. Accordingly, the invention provides methods for determining whether a subject has or is at risk of developing a neurological disease, e.g., ACCPN. In another embodiment, the invention provides methods for determining whether a subject has or is at risk of developing a vascular disorder or a disorder associated with cell fate determination. In one embodiment, the invention comprises determining the identity of the Delta3 allele in a subject and comparing the molecular structure of the Delta3 gene of the subject with the molecular structure of a Delta3 gene from a subject which does not have the neurological disease. Determining the molecular structure can be, e.g., determining the identity of at least one nucleotide, determining the nucleotide composition or determining the methylation pattern of the gene.

[0992] In one embodiment, the invention provides a method for determining whether a subject has genetic lesion in a Delta3 gene or a specific allelic variant of a polymorphic region in a Delta3 gene. The specific allele can be a mutant allele. In another embodiment, the invention provides methods for determining whether a subject has an aberrant Delta3 protein, resulting from aberrant post-translational modifications of the protein, such as aberrant phosphorogulation or glycosylation. Also, within the scope of the invention are methods for determining whether a subject has an aberrant expression level of a Delta3 protein, which could be due to a genetic lesion in the Delta3 gene or due to an aberrant level or activity of a protein regulating the expression of a Delta3 gene.

[0993] In preferred embodiments, the methods can be characterized as comprising detecting, in a sample of cells from the subject, the presence or absence of a genetic lesion characterized by at least one of (i) an alteration affecting the integrity of a gene encoding a Delta-protein, or (ii) the mis-expression of a Delta3 gene. To illustrate, such genetic lesions can be detected by ascertaining the existence of at least one of (i) a deletion of one or more nucleotides from a Delta3 gene, (ii) an addition of one or more nucleotides to a Delta3 gene, (iii) a substitution of one or more nucleotides of a Delta3 gene, (iv) a gross chromosomal rearrangement of a Delta3 gene, (v) a gross alteration in the level of a messenger RNA transcript of a Delta3 gene, (vii) aberrant modification of a Delta3 gene, such as of the methylation pattern of the genomic DNA, (vii) the presence of a non-wild type splicing pattern of a messenger RNA transcript of a Delta3 gene, (viii) a non-wild type level of a Delta-protein, (ix) allelic loss of a Delta3 gene, and (x) inappropriate post-translational modification of a Delta-protein. As set out below, the present invention provides a large number of assay techniques for detecting lesions in a Delta3 gene, and importantly, provides the ability to discern between different molecular causes underlying Delta-dependent aberrant cell proliferation and/or differentiation.

[0994] For determining whether a subject has or is at risk of developing a disease or condition associated with a specific allele of a Delta3 gene, preliminary experiments can be performed to determine the identity of the allele associated with a disease. For example, for determining the identity of the hDelta3 allele associated with ACCPN, one can perform mutation detection studies of the Delta3 gene in populations having a high risk of developing ACCPN. For example, one can perform mutation detection analysis of the genomic DNA from subjects in the French Canadian population in the Charlevoix and Saguenay-Lac St Jean regions of the province of Quebec (Casaubon et al. (1996) Am. J. Hum. Genet. 58:28). Such an analysis will reveal the identity of the Delta3 allele or alleles associated with ACCPN. Comparison of the Delta3 allele of a subject with this allele or alleles associated with ACCPN will indicate whether a subject has a Delta3 allele associated with ACCPN and thus whether the subject has or is likely to develop ACCPN. Similarly, mutation detection analysis can also be carried out to determine the identity of Delta3 alleles associated with other diseases or conditions.

[0995] In an exemplary embodiment, there is provided a nucleic acid composition comprising a (purified) oligonucleotide probe including a region of nucleotide sequence which is capable of hybridizing to a sense or antisense sequence of a Delta3 gene, such as represented by any of SEQ ID NOs: 1, 3, 24, 26, 27, 29, 31, 33, 35, 37, 39, 41, 43 or 45, alleles thereof, naturally-occurring mutants thereof, or 5′ or 3′ flanking sequences or intronic sequences naturally associated with the subject Delta3 genes or naturally-occurring mutants thereof. The nucleic acid of a cell is rendered accessible for hybridization, the probe is exposed to nucleic acid of the sample, and the hybridization of the probe to the sample nucleic acid is detected. Such techniques can be used to detect lesions at either the genomic or mRNA level, including deletions, substitutions, etc., as well as to determine mRNA transcript levels.

[0996] As set out above, one aspect of the present invention relates to diagnostic assays for determining, in the context of cells isolated from a patient, if mutations have arisen in one or more Delta3 genes of the sample cells. The present method provides a method for determining if a subject is at risk for a disorder characterized by aberrant Delta3 activity, e.g., cell proliferation and/or differentiation. In preferred embodiments, the method can be generally characterized as comprising detecting, in a sample of cells from the subject, the presence or absence of a genetic lesion characterized by an alteration affecting the integrity of a gene encoding a Delta protein. To illustrate, such genetic lesions can be detected by ascertaining the existence of at least one of (i) a deletion of one or more nucleotides from a Delta-gene, (ii) an addition of one or more nucleotides to a Delta-gene, (iii) a substitution of one or more nucleotides of a Delta-gene, and (iv) the presence of a non-wild type splicing pattern of a messenger RNA transcript of a Delta-gene. As set out below, the present invention provides a large number of assay techniques for detecting lesions in Delta3 genes, and importantly, provides the ability to discern between different molecular causes underlying Delta-dependent aberrant cell proliferation and/or differentiation.

[0997] In certain embodiments, detection of the lesion in a Delta gene or the identity of an allelic variant of a polymorphic region of a Delta gene comprises utilizing the probe/primer in a polymerase chain reaction (PCR) (see, e.g., U.S. Pat. Nos. 4,683,195 and 4,683,202), such as anchor PCR or RACE PCR, or, alternatively, in a ligation chain reaction (LCR) (see, e.g., Landegran et al. (1988) Science 241:1077-1080; and Nakazawa et al. (1994) PNAS 91:360-364), the latter of which can be particularly useful for detecting point mutations in the Delta-gene (see Abravaya et al. (1995) Nuc Acid Res 23:675-682). In a merely illustrative embodiment, the method includes the steps of (i) collecting a sample of cells from a patient, (ii) isolating nucleic acid (e.g., genomic, mRNA or both) from the cells of the sample, (iii) contacting the nucleic acid sample with one or more primers which specifically hybridize to a Delta gene under conditions such that hybridization and amplification of the Delta-gene (if present) occurs, and (iv) detecting the presence or absence of an amplification product, or detecting the size of the amplification product and comparing the length to a control sample. It is anticipated that PCR and/or LCR may be desirable to use as a preliminary amplification step in conjunction with any of the techniques used for detecting mutations described herein.

[0998] Alternative amplification methods include: self sustained sequence replication (Guatelli, J. C. et al., 1990, Proc. Natl. Acad. Sci. USA 87:1874-1878), transcriptional amplification system (Kwoh, D. Y. et al., 1989, Proc. Natl. Acad. Sci. USA 86:1173-1177), Q-Beta Replicase (Lizardi, P. M. et al., 1988, Bio/Technology 6:1197), or any other nucleic acid amplification method, followed by the detection of the amplified molecules using techniques well known to those of skill in the art. These detection schemes are especially useful for the detection of nucleic acid molecules if such molecules are present in very low numbers.

[0999] In a preferred embodiment of the subject assay, mutations in a Delta3 gene or specific alleles of a Delta3 gene from a sample cell are identified by alterations in restriction enzyme cleavage patterns. For example, sample and control DNA is isolated, amplified (optionally), digested with one or more restriction endonucleases, and fragment length sizes are determined by gel electrophoresis. Moreover, the use of sequence specific ribozymes (see, for example, U.S. Pat. No. 5,498,531, incorporated herein by reference in its entirety) can be used to score for the presence of specific mutations by development or loss of a ribozyme cleavage site.

[1000] In yet another embodiment, any of a variety of sequencing reactions known in the art can be used to directly sequence the Delta3 gene and detect mutations or allelic variants of polymorphic regions by comparing the sequence of the sample Delta3 with the corresponding wild-type (control) sequence. Exemplary sequencing reactions include those based on techniques developed by Maxim and Gilbert (Proc. Natl. Acad Sci USA (1977) 74:560) or Sanger (Sanger et al (1977) Proc. Nat. Acad. Sci. 74:5463). It is also contemplated that any of a variety of automated sequencing procedures may be utilized when performing the subject assays (Biotechniques (1995) 19:448), including by sequencing by mass spectrometry (see, for example PCT publication WO 94/16101; Cohen et al. (1996) Adv Chromatogr 36:127-162; and Griffin et al. (1993) Appl Biochem Biotechnol 38:147-159). It will be evident to one skilled in the art that, for certain embodiments, the occurrence of only one, two or three of the nucleic acid bases need be determined in the sequencing reaction. For instance, A-tract or the like, e.g., where only one nucleic acid is detected, can be carried out.

[1001] In a further embodiment, protection from cleavage agents (such as a nuclease, hydroxylamine or osmium tetroxide and with piperidine) can be used to detect mismatched bases in RNA/RNA or RNA/DNA heteroduplexes (Myers, et al. (1985) Science 230:1242). In general, the art technique of “mismatch cleavage” starts by providing heteroduplexes of formed by hybridizing (labeled) RNA or DNA containing the wild-type Delta3 sequence with potentially mutant RNA or DNA obtained from a tissue sample. The double-stranded duplexes are treated with an agent which cleaves single-stranded regions of the duplex such as which will exist due to basepair mismatches between the control and sample strands. For instance, RNA/DNA duplexes can be treated with RNase and DNA/DNA hybrids treated with S1 nuclease to enzymatically digesting the mismatched regions. In other embodiments, either DNA/DNA or RNA/DNA duplexes can be treated with hydroxylamine or osmium tetroxide and with piperidine in order to digest mismatched regions. After digestion of the mismatched regions, the resulting material is then separated by size on denaturing polyacrylamide gels to determine the site of mutation. See, for example, Cotton et al (1988) Proc. Natl. Acad Sci USA 85:4397; Saleeba et al (1992) Methods Enzymod. 217:286-295. In a preferred embodiment, the control DNA or RNA can be labeled for detection.

[1002] In still another embodiment, the mismatch cleavage reaction employs one or more proteins that recognize mismatched base pairs in double-stranded DNA (so called “DNA mismatch repair” enzymes) in defined systems for detecting and mapping point mutations in Delta3 cDNAs obtained from samples of cells. For example, the mutY enzyme of E. coli cleaves A at G/A mismatches and the thymidine DNA glycosylase from HeLa cells cleaves T at G/T mismatches (Hsu et al. (1994) Carcinogenesis 15:1657-1662). According to an exemplary embodiment, a probe based on a Delta3 sequence, e.g., a wild-type Delta3 sequence, is hybridized to a cDNA or other DNA product from a test cell(s). The duplex is treated with a DNA mismatch repair enzyme, and the cleavage products, if any, can be detected from electrophoresis protocols or the like. See, for example, U.S. Pat. No. 5,459,039, incorporated herein by reference in its entirety.

[1003] In other embodiments, alterations in electrophoretic mobility will be used to identify mutations in Delta3 genes or for determining the identity of the Delta3 allele. For example, single strand conformation polymorphism (SSCP) may be used to detect differences in electrophoretic mobility between mutant and wild type nucleic acids (Orita et al. (1989) Proc Natl. Acad. Sci. USA 86:2766, see also Cotton (1993) Mutat Res 285:125-144; and Hayashi (1992) Genet Anal Tech Appl 9:73-79). Single-stranded DNA fragments of sample and control Delta3 nucleic acids will be denatured and allowed to renature. The secondary structure of single-stranded nucleic acids varies according to sequence, the resulting alteration in electrophoretic mobility enables the detection of even a single base change. The DNA fragments may be labelled or detected with labelled probes. The sensitivity of the assay may be enhanced by using RNA (rather than DNA), in which the secondary structure is more sensitive to a change in sequence. In a preferred embodiment, the subject method utilizes heteroduplex analysis to separate double stranded heteroduplex molecules on the basis of changes in electrophoretic mobility (Keen et al. (1991) Trends Genet 7:5).

[1004] In yet another embodiment the movement of mutant or wild-type fragments in polyacrylamide gels containing a gradient of denaturant is assayed using denaturing gradient gel electrophoresis (DGGE) (Myers et al (1985) Nature 313:495). When DGGE is used as the method of analysis, DNA will be modified to insure that it does not completely denature, for example by adding a GC clamp of approximately 40 bp of high-melting GC-rich DNA by PCR. In a further embodiment, a temperature gradient is used in place of a denaturing agent gradient to identify differences in the mobility of control and sample DNA (Rosenbaum and Reissner (1987) Biophys Chem 265:12753).

[1005] Examples of other techniques for detecting point mutations include, but are not limited to, selective oligonucleotide hybridization, selective amplification, or selective primer extension. For example, oligonucleotide primers may be prepared in which the known mutation is placed centrally and then hybridized to target DNA under conditions which permit hybridization only if a perfect match is found (Saiki et al. (1986) Nature 324:163); Saiki et al (1989) Proc. Natl. Acad. Sci. USA 86:6230). Such allele specific oligonucleotide hybridization techniques may be used to test one mutation per reaction when oligonucleotides are hybridized to PCR amplified target DNA or a number of different mutations when the oligonucleotides are attached to the hybridizing membrane and hybridized with labeled target DNA.

[1006] Alternatively, allele specific amplification technology which depends on selective PCR amplification may be used in conjunction with the instant invention. Oligonucleotides used as primers for specific amplification may carry the mutation of interest in the center of the molecule (so that amplification depends on differential hybridization) (Gibbs et al (1989) Nucleic Acids Res. 17:2437-2448) or at the extreme 3′ end of one primer where, under appropriate conditions, mismatch can prevent, or reduce polymerase extension (Prossner (1993) Tibtech 11:238. In addition it may be desirable to introduce a novel restriction site in the region of the mutation to create cleavage-based detection (Gasparini et al. (1992) Mol. Cell. Probes 6:1). It is anticipated that in certain embodiments amplification may also be performed using Taq ligase for amplification (Barany (1991) Proc. Natl. Acad. Sci. USA 88:189). In such cases, ligation will occur only if there is a perfect match at the 3′ end of the 5′ sequence making it possible to detect the presence of a known mutation at a specific site by looking for the presence or absence of amplification.

[1007] Another embodiment of the invention provides for a nucleic acid composition comprising a (purified) oligonucleotide probe including a region of nucleotide sequence which is capable of hybridizing to a sense or antisense sequence of a Delta-gene, or naturally-occurring mutants thereof, or 5′ or 3′ flanking sequences or intronic sequences naturally associated with the subject Delta-genes or naturally-occurring mutants thereof. The nucleic acid of a cell is rendered accessible for hybridization, the probe is exposed to nucleic acid of the sample, and the hybridization of the probe to the sample nucleic acid is detected. Such techniques can be used to detect lesions at either the genomic or mRNA level, including deletions, substitutions, etc., as well as to determine mRNA transcript levels. Such oligonucleotide probes can be used for both predictive and therapeutic evaluation of allelic mutations which might be manifest in, for example, a neurodegenerative, neoplastic or hyperplastic disorders (e.g., aberrant cell growth).

[1008] The methods described herein may be performed, for example, by utilizing pre-packaged diagnostic kits comprising at least one probe nucleic acid or antibody reagent described herein, which may be conveniently used, e.g., in clinical settings to diagnose patients exhibiting symptoms or family history of a disease or illness involving a Delta3 gene.

[1009] Any cell type or tissue, preferably neural or endothelial cells, in which the Delta3 is expressed may be utilized in the diagnostics described below. For example, a subject's bodily fluid (e.g., blood) can be obtained by known techniques (e.g., venipuncture). Alternatively, nucleic acid tests can be performed on dry samples (e.g., hair or skin). Fetal nucleic acid samples can be obtained from maternal blood as described in International Patent Application NO: WO91/07660 to Bianchi. Alternatively, amniocytes or chorionic villi may be obtained for performing prenatal testing, e.g., of ACCPN, which is a disease which is usually fatal in the third decade of life.

[1010] Diagnostic procedures may also be performed in situ directly upon tissue sections (fixed and/or frozen) of patient tissue obtained from biopsies or resections, such that no nucleic acid purification is necessary. Nucleic acid reagents may be used as probes and/or primers for such in situ procedures (see, for example, Nuovo, G. J., 1992, PCR in situ hybridization: protocols and applications, Raven Press, NY).

[1011] In addition to methods which focus primarily on the detection of one nucleic acid sequence, profiles may also be assessed in such detection schemes. Fingerprint profiles may be generated, for example, by utilizing a differential display procedure, Northern analysis and/or RT-PCR.

[1012] Antibodies directed against wild type or mutant Delta3 proteins, which are discussed, above, may also be used in disease diagnostics and prognostics. Such diagnostic methods, may be used to detect abnormalities in the level of Delta3 protein expression, or abnormalities in the structure and/or tissue, cellular, or subcellular location of Delta3 proteins. Structural differences may include, for example, differences in the size, electronegativity, or antigenicity of the mutant Delta3 protein relative to the normal Delta3 protein. Protein from the tissue or cell type to be analyzed may easily be detected or isolated using techniques which are well known to one of skill in the art, including but not limited to western blot analysis. For a detailed explanation of methods for carrying out western blot analysis, see Sambrook et al, 1989, supra, at Chapter 18. The protein detection and isolation methods employed herein may also be such as those described in Harlow and Lane, for example, (Harlow, E. and Lane, D., 1988, “Antibodies: A Laboratory Manual”, Cold Spring Harbor Laboratory Press, Cold Spring Harbor, N.Y.).

[1013] This can be accomplished, for example, by immunofluorescence techniques employing a fluorescently labeled antibody (see below) coupled with light microscopic, flow cytometric, or fluorimetric detection. The antibodies (or fragments thereof) useful in the present invention may, additionally, be employed histologically, as in immunofluorescence or immunoelectron microscopy, for in situ detection of Delta3 proteins. In situ detection may be accomplished by removing a histological specimen from a patient, and applying thereto a labeled antibody of the present invention. The antibody (or fragment) is preferably applied by overlaying the labeled antibody (or fragment) onto a biological sample. Through the use of such a procedure, it is possible to determine not only the presence of the Delta3 protein, but also its distribution in the examined tissue. Using the present invention, one of ordinary skill will readily perceive that any of a wide variety of histological methods (such as staining procedures) can be modified in order to achieve such in situ detection.

[1014] Often a solid phase support or carrier is used as a support capable of binding an antigen or an antibody. Well-known supports or carriers include glass, polystyrene, polypropylene, polyethylene, dextran, nylon, amylases, natural and modified celluloses, polyacrylamides, gabbros, and magnetite. The nature of the carrier can be either soluble to some extent or insoluble for the purposes of the present invention. The support material may have virtually any possible structural configuration so long as the coupled molecule is capable of binding to an antigen or antibody. Thus, the support configuration may be spherical, as in a bead, or cylindrical, as in the inside surface of a test tube, or the external surface of a rod. Alternatively, the surface may be flat such as a sheet, test strip, etc. Preferred supports include polystyrene beads. Those skilled in the art will know many other suitable carriers for binding antibody or antigen, or will be able to ascertain the same by use of routine experimentation.

[1015] One means for labeling an anti-Delta3 protein specific antibody is via linkage to an enzyme and use in an enzyme immunoassay (EIA) (Voller, “The Enzyme Linked Immunosorbent Assay (ELISA)”, Diagnostic Horizons 2:1-7, 1978, Microbiological Associates Quarterly Publication, Walkersville, Md.; Voller, et al., J. Clin. Pathol. 31:507-520 (1978); Butler, Meth. Enzymol. 73:482-523 (1981); Maggio, (ed.) Enzyme Immunoassay, CRC Press, Boca Raton, Fla., 1980; Ishikawa, et al., (eds.) Enzyme Immunoassay, Kgaku Shoin, Tokyo, 1981). The enzyme which is bound to the antibody will react with an appropriate substrate, preferably a chromogenic substrate, in such a manner as to produce a chemical moiety which can be detected, for example, by spectrophotometric, fluorimetric or by visual means. Enzymes which can be used to detectably label the antibody include, but are not limited to, malate dehydrogenase, staphylococcal nuclease, delta-5-steroid isomerase, yeast alcohol dehydrogenase, alpha-glycerophosphate, dehydrogenase, triose phosphate isomerase, horseradish peroxidase, alkaline phosphatase, asparaginase, glucose oxidase, beta-galactosidase, ribonuclease, urease, catalase, glucose-6-phosphate dehydrogenase, glucoamylase and acetylcholinesterase. The detection can be accomplished by colorimetric methods which employ a chromogenic substrate for the enzyme. Detection may also be accomplished by visual comparison of the extent of enzymatic reaction of a substrate in comparison with similarly prepared standards.

[1016] Detection may also be accomplished using any of a variety of other immunoassays. For example, by radioactively labeling the antibodies or antibody fragments, it is possible to detect fingerprint gene wild type or mutant peptides through the use of a radioimmunoassay (RIA) (see, for example, Weintraub, B., Principles of Radioimmunoassays, Seventh Training Course on Radioligand Assay Techniques, The Endocrine Society, March, 1986). The radioactive isotope can be detected by such means as the use of a gamma counter or a scintillation counter or by autoradiography.

[1017] It is also possible to label the antibody with a fluorescent compound. When the fluorescently labeled antibody is exposed to light of the proper wave length, its presence can then be detected due to fluorescence. Among the most commonly used fluorescent labeling compounds are fluorescein isothiocyanate, rhodamine, phycoerythrin, phycocyanin, allophycocyanin, o-phthaldehyde and fluorescamine.

[1018] The antibody can also be detectably labeled using fluorescence emitting metals such as 152Eu, or others of the lanthanide series. These metals can be attached to the antibody using such metal chelating groups as diethylenetriaminepentacetic acid (DTPA) or ethylenediaminetetraacetic acid (EDTA).

[1019] The antibody also can be detectably labeled by coupling it to a chemiluminescent compound. The presence of the chemiluminescent-tagged antibody is then determined by detecting the presence of luminescence that arises during the course of a chemical reaction. Examples of particularly useful chemiluminescent labeling compounds are luminol, isoluminol, theromatic acridinium ester, imidazole, acridinium salt and oxalate ester.

[1020] Likewise, a bioluminescent compound may be used to label the antibody of the present invention. Bioluminescence is a type of chemiluminescence found in biological systems in, which a catalytic protein increases the efficiency of the chemiluminescent reaction. The presence of a bioluminescent protein is determined by detecting the presence of luminescence. Important bioluminescent compounds for purposes of labeling are luciferin, luciferase and aequorin.

[1021] Moreover, it will be understood that any of the above methods for detecting alterations in a Delta3 gene or gene product can be used to monitor the course of treatment or therapy.

### Delta3 Drug Screening Assays

[1022] The invention provides for compounds, e.g., therapeutic compounds, for treating diseases or conditions caused by, or contributed to by an abnormal Delta3 activity. The compounds that can be used for this purpose can be any type of compound, including a protein, a peptide, peptidomimetic, small molecule, and nucleic acid. A nucleic acid can be, e.g., a gene, an antisense nucleic acid, a ribozyme, or a triplex molecule. A compound of the invention can be an agonist or an antagonist. A compound can act on a Delta3 gene, e.g., to modulate its expression. A compound can also act on a Delta3 protein, e.g., to modulate signal transduction from the receptor. Accordingly, a compound of the invention can be a compound which binds to Delta3 and induces signal transduction from the receptor, such that, e.g., a Delta3 activity is induced. Alternatively, a compound of the invention can be a compound which inhibits interaction of a Delta3 protein with a toporythmic protein, e.g., Notch. In one embodiment, a compound of the invention which interacts with a Delta protein, which is either an agonist or an antagonist, is a toporythmic protein or other protein interacting with Delta3. In an even more preferred embodiment, the compound is a soluble toporythmic protein or other protein interacting with Delta3. For example, a soluble antagonistic toporythmic protein can be a protein which competes with the wild type toporythmic proteins for binding to Delta3. A soluble agonistic toporythmic protein can be a protein which binds to a Delta3 protein in essentially the same manner as a wild-type toporythmic protein, such as to induce at least one Delta3 activity, e.g., signal transduction from the Delta3 protein. Accordingly, a soluble toporythmic protein can be stimulatory form of a toporythmic protein or an inhibitory form of a toporythmic, depending on whether the particular toporythmic protein stimulates or inhibits a Delta3 activity.

[1023] Similarly, a soluble Delta3 protein, e.g., Delta3-Ig, can be used to modulate an activity of a toporythmic protein, e.g., Notch. For example, a soluble Delta3 protein can be a stimulatory form of a Delta3 protein, i.e., a Delta3 protein which is capable of stimulating an activity of a toporythmic protein. In one embodiment, such a protein acts in essentially the same manner as wild-type Delta3. In another embodiment, a soluble Delta3 protein is an inhibitory form of a Delta3 protein, i.e., a Delta3 protein which is capable of inhibiting an activity of a toporythmic protein. For example, such a Delta3 protein could inhibit the interaction of wild-type Delta3 with the toporythmic protein. In a preferred embodiment, an inhibitory form of a Delta3 protein inhibits the interaction of several proteins which normally interact with a toporythmic protein, by, e.g., binding to a site of the toporythmic protein that is also a binding site to various other proteins, e.g., other Delta proteins. Accordingly, a Delta3 therapeutic can generally affect the interaction of various toporythmic proteins with each other. Similarly, based at least in part on the sequence and structural similarities between Delta proteins, a Delta therapeutic, other than a Delta3 therapeutic, can also be used for modulating the interaction between a Delta3 protein and a Delta3 interacting binding molecule.

[1024] The compounds of the invention can be identified using various assays depending on the type of compound and activity of the compound that is desired. Set forth below are at least some assays that can be used for identifying Delta3 therapeutics. It is within the skill of the art to design additional assays for identifying Delta therapeutics, e.g., Delta3 therapeutics.

[1025] By making available purified and recombinant Delta3 polypeptides, the present invention facilitates the development of assays which can be used to screen for drugs, including Delta3 variants, which are either agonists or antagonists of the normal cellular function of the subject Delta3 polypeptides, or of their role in the pathogenesis of cellular differentiation and/or proliferation and disorders related thereto. In one embodiment, the assay evaluates the ability of a compound to modulate binding between a Delta3 polypeptide and a molecule, be it protein or DNA, that interacts either upstream or downstream of the Delta/Notch signaling pathway. A variety of assay formats will suffice and, in light of the present inventions, will be comprehended by a skilled artisan.

### Delta3 Cell-Free Assays

[1026] Cell free assays can be used to identify compounds which interact with a Delta3 protein. Such assays are available for testing compounds which are proteins, e.g., toporythmic proteins or variants thereof, as well as for testing compounds which are peptidomimetics, small molecules or nucleic acids. The specific assay used for testing these compounds may vary with the type of compound.

[1027] In one embodiment, a compound that interacts with a Delta3 protein is identified by screening, e.g., a library of compounds, for binding to a recombinant or purified Delta3 protein or at least a portion thereof. Such assays can involve labeling one or the two components and measuring the extent of their interaction, by, e.g., determining the level of the one or two labels. In these assays, it may be preferable to attach the Delta3 protein to a solid phase surface. Methods for achieving this are further described infra. In one embodiment, the library of compounds is a library of small molecules. In another embodiment, the library of compounds is a library of Delta3 variants, which can be produced according to methods described infra.

[1028] Identification of a compound which inhibits an interaction between a Delta3 protein and a toporythmic protein can also be performed by screening compounds using aggregation assays, as described, e.g., in Fehon et al. (1990) Cell 61:523-534.

[1029] In another embodiment, the invention provides methods for identifying compounds which inhibit the interaction of a Delta3 protein with a molecule, e.g., a toporythmic protein or a protein interacting with the cytoplasmic domain of a Delta3 protein. Such methods, which are preferably used in high throughput assays can be performed as follows.

[1030] In many drug screening programs which test libraries of compounds and natural extracts, high throughput assays are desirable in order to maximize the number of compounds surveyed in a given period of time. Assays which are performed in cell-free systems, such as may be derived with purified or semi-purified proteins, are often preferred as “primary” screens in that they can be generated to permit rapid development and relatively easy detection of an alteration in a molecular target which is mediated by a test compound. Moreover, the effects of cellular toxicity and/or bioavailability of the test compound can be generally ignored in the in vitro system, the assay instead being focused primarily on the effect of the drug on the molecular target as may be manifest in an alteration of binding affinity with upstream or downstream elements. Accordingly, in an exemplary screening assay of the present invention, the compound of interest is contacted with proteins which may function upstream (including both activators and repressors of its activity) or to proteins or nucleic acids which may function downstream of the Delta3 polypeptide, whether they are positively or negatively regulated by it. For example, a protein functioning upstream of a Delta3 polypeptide can be a compound interacting with the extracellular portion of the Delta3 molecule. A protein functioning downstream of a Delta3 polypeptide can be a protein interacting with the cytoplasmic domain of Delta3 and, e.g., transducing a signal to the nucleus. To the mixture of the compound and the upstream or downstream element is then added a composition containing a Delta3 polypeptide. Detection and quantification of complexes of Delta3 with it's upstream or downstream elements provide a means for determining a compound's efficacy at inhibiting (or potentiating) complex formation between Delta3 and the Delta-binding elements. The efficacy of the compound can be assessed by generating dose response curves from data obtained using various concentrations of the test compound. Moreover, a control assay can also be performed to provide a baseline for comparison. In the control assay, isolated and purified Delta3 polypeptide is added to a composition containing the Delta-binding element, and the formation of a complex is quantitated in the absence of the test compound.

[1031] Complex formation between the Delta3 polypeptide and a Delta3 binding element may be detected by a variety of techniques. Modulation of the formation of complexes can be quantitated using, for example, detectably labeled proteins such as radiolabeled, fluorescently labeled, or enzymatically labeled Delta3 polypeptides, by immunoassay, or by chromatographic detection.

[1032] Typically, it will be desirable to immobilize either Delta3 or its binding protein to facilitate separation of complexes from uncomplexed forms of one or both of the proteins, as well as to accommodate automation of the assay. Binding of Delta3 to an upstream or downstream element, in the presence and absence of a candidate agent, can be accomplished in any vessel suitable for containing the reactants. Examples include microtitre plates, test tubes, and micro-centrifuge tubes. In one embodiment, a fusion protein can be provided which adds a domain that allows the protein to be bound to a matrix. For example, glutathione-S-transferase/Delta3 (GST/Delta) fusion proteins can be adsorbed onto glutathione sepharose beads (Sigma Chemical, St. Louis, Mo.) or glutathione derivatized microtitre plates, which are then combined with the cell lysates, e.g., an ³⁵S-labeled, and the test compound, and the mixture incubated under conditions conducive to complex formation, e.g., at physiological conditions for salt and pH, though slightly more stringent conditions may be desired. Following incubation, the beads are washed to remove any unbound label, and the matrix immobilized and radiolabel determined directly (e.g., beads placed in scintilant), or in the supernatant after the complexes are subsequently dissociated. Alternatively, the complexes can be dissociated from the matrix, separated by SDS-PAGE, and the level of Delta-binding protein found in the bead fraction quantitated from the gel using standard electrophoretic techniques such as described in the appended examples.

[1033] Other techniques for immobilizing proteins on matrices are also available for use in the subject assay. For instance, either Delta3 or its cognate binding protein can be immobilized utilizing conjugation of biotin and streptavidin. For instance, biotinylated Delta3 molecules can be prepared from biotin-NHS (N-hydroxy-succinimide) using techniques well known in the art (e.g., biotinylation kit, Pierce Chemicals, Rockford, Ill.), and immobilized in the wells of streptavidin-coated 96 well plates (Pierce Chemical). Alternatively, antibodies reactive with Delta3 but which do not interfere with binding of upstream or downstream elements can be derivatized to the wells of the plate, and Delta3 trapped in the wells by antibody conjugation. As above, preparations of a Delta-binding protein and a test compound are incubated in the Delta-presenting wells of the plate, and the amount of complex trapped in the well can be quantitated. Exemplary methods for detecting such complexes, in addition to those described above for the GST-immobilized complexes, include immunodetection of complexes using antibodies reactive with the Delta3 binding element, or which are reactive with Delta3 protein and compete with the binding element; as well as enzyme-linked assays which rely on detecting an enzymatic activity associated with the binding element, either intrinsic or extrinsic activity. In the instance of the latter, the enzyme can be chemically conjugated or provided as a fusion protein with the Delta-BP. To illustrate, the Delta-BP can be chemically cross-linked or genetically fused with horseradish peroxidase, and the amount of polypeptide trapped in the complex can be assessed with a chromogenic substrate of the enzyme, e.g., 3,3′-diamino-benzadine terahydrochloride or 4-chloro-1-naphthol. Likewise, a fusion protein comprising the polypeptide and glutathione-S-transferase can be provided, and complex formation quantitated by detecting the GST activity using 1-chloro-2,4-dinitrobenzene (Habig et al (1974) J Biol Chem 249:7130).

[1034] For processes which rely on immunodetection for quantitating one of the proteins trapped in the complex, antibodies against the protein, such as anti-Delta3 antibodies, can be used. Alternatively, the protein to be detected in the complex can be “epitope tagged” in the form of a fusion protein which includes, in addition to the Delta3 sequence, a second polypeptide for which antibodies are readily available (e.g., from commercial sources). For instance, the GST fusion proteins described above can also be used for quantification of binding using antibodies against the GST moiety. Other useful epitope tags include myc-epitopes (e.g., see Ellison et al. (1991) J Biol Chem 266:21150-21157) which includes a 10-residue sequence from c-myc, as well as the pFLAG system (International Biotechnologies, Inc.) or the pEZZ-protein A system (Pharmacia, NJ).

### Delta3 Cell Based Assays

[1035] In addition to cell-free assays, such as described above, the readily available source of Delta3 proteins provided by the present invention also facilitates the generation of cell-based assays for identifying small molecule agonists/antagonists and the like. For example, cells which are sensitive to bFGF/VEGF or matrigel can be caused to overexpress a recombinant Delta3 protein in the presence and absence of a test agent of interest, with the assay scoring for modulation in Delta3 responses by the target cell mediated by the test agent. As with the cell-free assays, agents which produce a statistically significant change in Delta-dependent responses (either inhibition or potentiation) can be identified. In an illustrative embodiment, the expression or activity of a Delta3 is modulated in embryos or cells and the effects of compounds of interest on the readout of interest (such as tissue differentiation, proliferation, tumorigenesis) are measured. For example, the expression of genes which are up- or down-regulated in response to a Delta-dependent signal cascade can be assayed. In preferred embodiments, the regulatory regions of such genes, e.g., the 5′ flanking promoter and enhancer regions, are operably linked to a detectable marker (such as luciferase) which encodes a gene product that can be readily detected.

[1036] Exemplary cell lines may include endothelial cells such as MVEC's and bovine aortic endothelial cells (BAEC's); as well as generic mammalian cell lines such as HeLa cells and COS cells, e.g., COS-7 (ATCC®# CRL-1651). Further, the transgenic animals discussed herein may be used to generate cell lines, containing one or more cell types involved in cardiovascular disease, that can be used as cell culture models for this disorder. While primary cultures derived from the transgenic animals of the invention may be utilized, the generation of continuous cell lines is preferred. For examples of techniques which may be used to derive a continuous cell line from the transgenic animals, see Small et al., 1985, Mol. Cell. Biol. 5:642-648.

[1037] In one embodiment, a test compound that modifies a Delta3 activity can be identified by incubating a cell having a Delta3 protein with the test compound and measuring signal transduction from the Delta3 protein. Comparison of the signal transduction in the cells incubated with or without the test compound will reveal whether the test compound is a Delta3 therapeutic. Similarly, a test compound that modifies a Delta3 activity can be identified by incubating a cell having a Delta3 ligand with the test compound, e.g., a Delta3 derived compound, and measuring signal transduction from the Delta3 ligand. Comparison of the signal transduction in the cells incubated with or without the test compound will reveal whether the test compound is a Delta3 therapeutic.

[1038] In the event that the Delta3 proteins themselves, or in complexes with other proteins, are capable of binding DNA and/or modifying transcription of a gene, a transcriptional based assay could be used, for example, in which a Delta3 responsive regulatory sequence is operably linked to a detectable marker gene, e.g., a luciferase gene. Similarly, Delta3 therapeutics could also be identified by using an assay in which expression of genes that are modulated upon binding of a Delta3 protein to a Delta3 ligand on a cell is monitored. Genes that are responsive to interaction with a Delta3 protein or Delta3 ligand can be identified according to methods known in the art, e.g., differential hybridization or differential display.

[1039] In another embodiment, a silicon-based device, called a microphysiometer, can be used to detect and measure the response of cells having a Delta3 protein to test compounds to identify Delta3 therapeutics. This instrument measures the rate at which cells acidify their environment, which is indicative of cellular growth and/or differentiation (McConnel et al. (1992) Science 257:1906).

[1040] Monitoring the influence of compounds on cells may be applied not only in basic drug screening, but also in clinical trials. In such clinical trials, the expression of a panel of genes may be used as a “read out” of a particular drug's therapeutic effect.

[1041] In yet another aspect of the invention, the subject Delta3 polypeptides can be used to generate a “two hybrid” assay (see, for example, U.S. Pat. No. 5,283,317; Zervos et al. (1993) Cell 72:223-232; Madura et al. (1993) J Biol Chem 268:12046-12054; Bartel et al. (1993) Biotechniques 14:920-924; Iwabuchi et al. (1993) Oncogene 8:1693-1696; and Brent WO94/10300), for isolating coding sequences for other cellular proteins which bind to or interact with Delta3 (“Delta-binding proteins” or “Delta-bp”), such as Notch, and the like.

[1042] Briefly, the two hybrid assay relies on reconstituting in vivo a functional transcriptional activator protein from two separate fusion proteins. In particular, the method makes use of chimeric genes which express hybrid proteins. To illustrate, a first hybrid gene comprises the coding sequence for a DNA-binding domain of a transcriptional activator fused in frame to the coding sequence for a Delta3 polypeptide. The second hybrid protein encodes a transcriptional activation domain fused in frame to a sample gene from a cDNA library. If the bait and sample hybrid proteins are able to interact, e.g., form a Delta-dependent complex, they bring into close proximity the two domains of the transcriptional activator. This proximity is sufficient to cause transcription of a reporter gene which is operably linked to a transcriptional regulatory site responsive to the transcriptional activator, and expression of the reporter gene can be detected and used to score for the interaction of the Delta3 and sample proteins. This system can be used to identify compounds which modify, e.g., inhibit the interaction between a Delta3 protein and another protein, by adding 1 test compound to a cell containing the above-described plasmids. The effect of the test compound on the reporter gene expression and then measured to determine the effect of the test compound on the interaction.

[1043] In another embodiment, the invention provides arrays for identifying compounds that can induce apoptosis of cells through a Delta3 protein. Apoptotic arrays are known in the act and are described, e.g., in Grimm et al. (1996) Proc. Natl. Acad. Sci. USA 93:10923.

### Delta3 Detection Assays

[1044] Portions or fragments of the cDNA sequences identified herein (and the corresponding complete gene sequences) can be used in numerous ways as polynucleotide reagents. For example, these sequences can be used to: (i) map their respective genes on a chromosome and, thus, locate gene regions associated with genetic disease; (ii) identify an individual from a minute biological sample (tissue typing); and (iii) aid in forensic identification of a biological sample. These applications are described in the subsections below.

### Delta3 Chromosome Mapping

[1045] Once the sequence (or a portion of the sequence) of a gene has been isolated, this sequence can be used to map the location of the gene on a chromosome. Accordingly, nucleic acid molecules described herein or fragments thereof, can be used to map the location of the corresponding genes on a chromosome. The mapping of the sequences to chromosomes is an important first step in correlating these sequences with genes associated with disease.

[1046] Briefly, genes can be mapped to chromosomes by preparing PCR primers (preferably 15-25 bp in length) from the sequence of a gene of the invention. Computer analysis of the sequence of a gene of the invention can be used to rapidly select primers that do not span more than one exon in the genomic DNA, thus complicating the amplification process. These primers can then be used for PCR screening of somatic cell hybrids containing individual human chromosomes. Only those hybrids containing the human gene corresponding to the gene sequences will yield an amplified fragment. For a review of this technique, see D'Eustachio et al. ((1983) Science 220:919-924).

[1047] PCR mapping of somatic cell hybrids is a rapid procedure for assigning a particular sequence to a particular chromosome. Three or more sequences can be assigned per day using a single thermal cycler. Using the nucleic acid sequences of the invention to design oligonucleotide primers, sublocalization can be achieved with panels of fragments from specific chromosomes. Other mapping strategies which can similarly be used to map a gene to its chromosome include in situ hybridization (described in Fan et al. (1990) Proc. Natl. Acad. Sci. USA 87:6223-27), pre-screening with labeled flow-sorted chromosomes (CITE), and pre-selection by hybridization to chromosome specific cDNA libraries. Fluorescence in situ hybridization (FISH) of a DNA sequence to a metaphase chromosomal spread can further be used to provide a precise chromosomal location in one step. For a review of this technique, see Verma et al., (Human Chromosomes: A Manual of Basic Techniques (Pergamon Press, New York, 1988)).

[1048] Reagents for chromosome mapping can be used individually to mark a single chromosome or a single site on that chromosome, or panels of reagents can be used for marking multiple sites and/or multiple chromosomes. Reagents corresponding to noncoding regions of the genes actually are preferred for mapping purposes. Coding sequences are more likely to be conserved within gene families, thus increasing the chance of cross hybridizations during chromosomal mapping.

[1049] Once a sequence has been mapped to a precise chromosomal location, the physical position of the sequence on the chromosome can be correlated with genetic map data. (Such data are found, for example, in V. McKusick, Mendelian Inheritance in Man, available on-line through Johns Hopkins University Welch Medical Library). The relationship between genes and disease, mapped to the same chromosomal region, can then be identified through linkage analysis (co-inheritance of physically adjacent genes), described in, e.g., Egeland et al. (1987) Nature 325:783-787.

[1050] Moreover, differences in the DNA sequences between individuals affected and unaffected with a disease associated with a gene of the invention can be determined. If a mutation is observed in some or all of the affected individuals but not in any unaffected individuals, then the mutation is likely to be the causative agent of the particular disease. Comparison of affected and unaffected individuals generally involves first looking for structural alterations in the chromosomes such as deletions or translocations that are visible from chromosome spreads or detectable using PCR based on that DNA sequence. Ultimately, complete sequencing of genes from several individuals can be performed to confirm the presence of a mutation and to distinguish mutations from polymorphisms.

[1051] Furthermore, the nucleic acid sequences disclosed herein can be used to perform searches against “mapping databases”, e.g., BLAST-type search, such that the chromosome position of the gene is identified by sequence homology or identity with known sequence fragments which have been mapped to chromosomes.

[1052] A polypeptide and fragments and sequences thereof and antibodies specific thereto can be used to map the location of the gene encoding the polypeptide on a chromosome. This mapping can be carried out by specifically detecting the presence of the polypeptide in members of a panel of somatic cell hybrids between cells of a first species of animal from which the protein originates and cells from a second species of animal and then determining which somatic cell hybrid(s) expresses the polypeptide and noting the chromosome(s) from the first species of animal that it contains. For examples of this technique, see Pajunen et al. (1988) Cytogenet. Cell Genet. 47:37-41 and Van Keuren et al. (1986) Hum. Genet. 74:34-40. Alternatively, the presence of the polypeptide in the somatic cell hybrids can be determined by assaying an activity or property of the polypeptide, for example, enzymatic activity, as described in Bordelon-Riser et al. (1979) Somatic Cell Genetics 5:597-613 and Owerbach et al. (1978) Proc. Natl. Acad. Sci. USA 75:5640-5644.

### Delta3 Tissue Typing

[1053] The nucleic acid sequences of the present invention can also be used to identify individuals from minute biological samples. The United States military, for example, is considering the use of restriction fragment length polymorphism (RFLP) for identification of its personnel. In this technique, an individual's genomic DNA is digested with one or more restriction enzymes, and probed on a Southern blot to yield unique bands for identification. This method does not suffer from the current limitations of “Dog Tags” which can be lost, switched, or stolen, making positive identification difficult. The sequences of the present invention are useful as additional DNA markers for RFLP (described in U.S. Pat. No. 5,272,057).

[1054] Furthermore, the sequences of the present invention can be used to provide an alternative technique which determines the actual base-by-base DNA sequence of selected portions of an individual's genome. Thus, the nucleic acid sequences described herein can be used to prepare two PCR primers from the 5′ and 3′ ends of the sequences. These primers can then be used to amplify an individual's DNA and subsequently sequence it.

[1055] Panels of corresponding DNA sequences from individuals, prepared in this manner, can provide unique individual identifications, as each individual will have a unique set of such DNA sequences due to allelic differences. The sequences of the present invention can be used to obtain such identification sequences from individuals and from tissue. The nucleic acid sequences of the invention uniquely represent portions of the human genome. Allelic variation occurs to some degree in the coding regions of these sequences, and to a greater degree in the noncoding regions. It is estimated that allelic variation between individual humans occurs with a frequency of about once per each 500 bases. Each of the sequences described herein can, to some degree, be used as a standard against which DNA from an individual can be compared for identification purposes. Because greater numbers of polymorphisms occur in the noncoding regions, fewer sequences are necessary to differentiate individuals. The noncoding sequences of SEQ ID NO: 1 and 24, can comfortably provide positive individual identification with a panel of perhaps 10 to 1,000 primers which each yield a noncoding amplified sequence of 100 bases. If predicted coding sequences, such as those in SEQ ID NO: 3 and 25 are used, a more appropriate number of primers for positive individual identification would be 500-2,000.

[1056] If a panel of reagents from the nucleic acid sequences described herein is used to generate a unique identification database for an individual, those same reagents can later be used to identify tissue from that individual. Using the unique identification database, positive identification of the individual, living or dead, can be made from extremely small tissue samples.

### Delta3 Use of Partial Gene Sequences in Forensic Biology

[1057] DNA-based identification techniques can also be used in forensic biology. Forensic biology is a scientific field employing genetic typing of biological evidence found at a crime scene as a means for positively identifying, for example, a perpetrator of a crime. To make such an identification, PCR technology can be used to amplify DNA sequences taken from very small biological samples such as tissues, e.g., hair or skin, or body fluids, e.g., blood, saliva, or semen found at a crime scene. The amplified sequence can then be compared to a standard, thereby allowing identification of the origin of the biological sample.

[1058] The sequences of the present invention can be used to provide polynucleotide reagents, e.g., PCR primers, targeted to specific loci in the human genome, which can enhance the reliability of DNA-based forensic identifications by, for example, providing another “identification marker” (i.e., another DNA sequence that is unique to a particular individual). As mentioned above, actual base sequence information can be used for identification as an accurate alternative to patterns formed by restriction enzyme generated fragments. Sequences targeted to noncoding regions are particularly appropriate for this use as greater numbers of polymorphisms occur in the noncoding regions, making it easier to differentiate individuals using this technique. Examples of polynucleotide reagents include the nucleic acid sequences of the invention or portions thereof, e.g., fragments derived from noncoding regions having a length of at least 20 or 30 bases.

[1059] The nucleic acid sequences described herein can further be used to provide polynucleotide reagents, e.g., labeled or labelable probes which can be used in, for example, an in situ hybridization technique, to identify a specific tissue, e.g., brain tissue. This can be very useful in cases where a forensic pathologist is presented with a tissue of unknown origin. Panels of such probes can be used to identify tissue by species and/or by organ type.

### Delta3 Predictive Medicine

[1060] The present invention also pertains to the field of predictive medicine in which diagnostic assays, prognostic assays, pharmacogenomics, and monitoring clinical trails are used for prognostic (predictive) purposes to thereby treat an individual prophylactically. Accordingly, one aspect of the present invention relates to diagnostic assays for determining expression of a polypeptide or nucleic acid of the invention and/or activity of a polypeptide of the invention, in the context of a biological sample (e.g., blood, serum, cells, tissue) to thereby determine whether an individual is afflicted with a disease or disorder, or is at risk of developing a disorder, associated with aberrant expression or activity of a polypeptide of the invention. The invention also provides for prognostic (or predictive) assays for determining whether an individual is at risk of developing a disorder associated with aberrant expression or activity of a polypeptide of the invention. For example, mutations in a gene of the invention can be assayed in a biological sample. Such assays can be used for prognostic or predictive purpose to thereby prophylactically treat an individual prior to the onset of a disorder characterized by or associated with aberrant expression or activity of a polypeptide of the invention.

[1061] Another aspect of the invention provides methods for expression of a nucleic acid or polypeptide of the invention or activity of a polypeptide of the invention in an individual to thereby select appropriate therapeutic or prophylactic agents for that individual (referred to herein as “pharmacogenomics”). Pharmacogenomics allows for the selection of agents (e.g., drugs) for therapeutic or prophylactic treatment of an individual based on the genotype of the individual (e.g., the genotype of the individual examined to determine the ability of the individual to respond to a particular agent).

[1062] Yet another aspect of the invention pertains to monitoring the influence of agents (e.g., drugs or other compounds) on the expression or activity of a polypeptide of the invention in clinical trials. These and other agents are described in further detail in the following sections.

### Delta3 Prognostic Assays

[1063] The methods described herein can furthermore be utilized as diagnostic or prognostic assays to identify subjects having or at risk of developing a disease or disorder associated with aberrant expression or activity of a polypeptide of the invention. For example, the assays described herein, such as the preceding diagnostic assays or the following assays, can be utilized to identify a subject having or at risk of developing a disorder associated with aberrant expression or activity of a polypeptide of the invention. Alternatively, the prognostic assays can be utilized to identify a subject having or at risk for developing such a disease or disorder. Thus, the present invention provides a method in which a test sample is obtained from a subject and a polypeptide or nucleic acid (e.g., mRNA, genomic DNA) of the invention is detected, wherein the presence of the polypeptide or nucleic acid is diagnostic for a subject having or at risk of developing a disease or disorder associated with aberrant expression or activity of the polypeptide. As used herein, a “test sample” refers to a biological sample obtained from a subject of interest. For example, a test sample can be a biological fluid (e.g., serum), cell sample, or tissue.

[1064] Furthermore, the prognostic assays described herein can be used to determine whether a subject can be administered an agent (e.g., an agonist, antagonist, peptidomimetic, protein, peptide, nucleic acid, small molecule, or other drug candidate) to treat a disease or disorder associated with aberrant expression or activity of a polypeptide of the invention. For example, such methods can be used to determine whether a subject can be effectively treated with a specific agent or class of agents (e.g., agents of a type which decrease activity of the polypeptide). Thus, the present invention provides methods for determining whether a subject can be effectively treated with an agent for a disorder associated with aberrant expression or activity of a polypeptide of the invention in which a test sample is obtained and the polypeptide or nucleic acid encoding the polypeptide is detected (e.g., wherein the presence of the polypeptide or nucleic acid is diagnostic for a subject that can be administered the agent to treat a disorder associated with aberrant expression or activity of the polypeptide).

[1065] The methods of the invention can also be used to detect genetic lesions or mutations in a gene of the invention, thereby determining if a subject with the lesioned gene is at risk for a disorder characterized aberrant expression or activity of a polypeptide of the invention. In preferred embodiments, the methods include detecting, in a sample of cells from the subject, the presence or absence of a genetic lesion or mutation characterized by at least one of an alteration affecting the integrity of a gene encoding the polypeptide of the invention, or the mis-expression of the gene encoding the polypeptide of the invention. For example, such genetic lesions or mutations can be detected by ascertaining the existence of at least one of: 1) a deletion of one or more nucleotides from the gene; 2) an addition of one or more nucleotides to the gene; 3) a substitution of one or more nucleotides of the gene; 4) a chromosomal rearrangement of the gene; 5) an alteration in the level of a messenger RNA transcript of the gene; 6) an aberrant modification of the gene, such as of the methylation pattern of the genomic DNA; 7) the presence of a non-wild type splicing pattern of a messenger RNA transcript of the gene; 8) a non-wild type level of a the protein encoded by the gene; 9) an allelic loss of the gene; and 10) an inappropriate post-translational modification of the protein encoded by the gene. As described herein, there are a large number of assay techniques known in the art which can be used for detecting lesions in a gene.

[1066] In certain embodiments, detection of the lesion involves the use of a probe/primer in a polymerase chain reaction (PCR) (see, e.g., U.S. Pat. Nos. 4,683,195 and 4,683,202), such as anchor PCR or RACE PCR, or, alternatively, in a ligation chain reaction (LCR) (see, e.g., Landegran et al. (1988) Science 241:1077-1080; and Nakazawa et al. (1994) Proc. Natl. Acad. Sci. USA 91:360-364), the latter of which can be particularly useful for detecting point mutations in a gene (see, e.g., Abravaya et al. (1995) Nucleic Acids Res. 23:675-682). This method can include the steps of collecting a sample of cells from a patient, isolating nucleic acid (e.g., genomic, mRNA or both) from the cells of the sample, contacting the nucleic acid sample with one or more primers which specifically hybridize to the selected gene under conditions such that hybridization and amplification of the gene (if present) occurs, and detecting the presence or absence of an amplification product, or detecting the size of the amplification product and comparing the length to a control sample. It is anticipated that PCR and/or LCR may be desirable to use as a preliminary amplification step in conjunction with any of the techniques used for detecting mutations described herein.

[1067] Alternative amplification methods include: self sustained sequence replication (Guatelli et al. (1990) Proc. Natl. Acad. Sci. USA 87:1874-1878), transcriptional amplification system (Kwoh, et al. (1989) Proc. Natl. Acad. Sci. USA 86:1173-1177), Q-Beta Replicase (Lizardi et al. (1988) Bio/Technology 6:1197), or any other nucleic acid amplification method, followed by the detection of the amplified molecules using techniques well known to those of skill in the art. These detection schemes are especially useful for the detection of nucleic acid molecules if such molecules are present in very low numbers.

[1068] In an alternative embodiment, mutations in a selected gene from a sample cell can be identified by alterations in restriction enzyme cleavage patterns. For example, sample and control DNA is isolated, amplified (optionally), digested with one or more restriction endonucleases, and fragment length sizes are determined by gel electrophoresis and compared. Differences in fragment length sizes between sample and control DNA indicates mutations in the sample DNA. Moreover, the use of sequence specific ribozymes (see, e.g., U.S. Pat. No. 5,498,531) can be used to score for the presence of specific mutations by development or loss of a ribozyme cleavage site.

[1069] In other embodiments, genetic mutations can be identified by hybridizing a sample and control nucleic acids, e.g., DNA or RNA, to high density arrays containing hundreds or thousands of oligonucleotides probes (Cronin et al. (1996) Human Mutation 7:244-255; Kozal et al. (1996) Nature Medicine 2:753-759). For example, genetic mutations can be identified in two-dimensional arrays containing light-generated DNA probes as described in Cronin et al. (1996) Human Mutation 7:244-255. Briefly, a first hybridization array of probes can be used to scan through long stretches of DNA in a sample and control to identify base changes between the sequences by making linear arrays of sequential overlapping probes. This step allows the identification of point mutations. This step is followed by a second hybridization array that allows the characterization of specific mutations by using smaller, specialized probe arrays complementary to all variants or mutations detected. Each mutation array is composed of parallel probe sets, one complementary to the wild-type gene and the other complementary to the mutant gene.

[1070] In yet another embodiment, any of a variety of sequencing reactions known in the art can be used to directly sequence the selected gene and detect mutations by comparing the sequence of the sample nucleic acids with the corresponding wild-type (control) sequence. Examples of sequencing reactions include those based on techniques developed by Maxim and Gilbert ((1977) Proc. Natl. Acad. Sci. USA 74:560) or Sanger ((1977) Proc. Natl. Acad. Sci. USA 74:5463). It is also contemplated that any of a variety of automated sequencing procedures can be utilized when performing the diagnostic assays ((1995) Bio/Techniques 19:448), including sequencing by mass spectrometry (see, e.g., PCT Publication NO: WO 94/16101; Cohen et al. (1996) Adv. Chromatogr. 36:127-162; and Griffin et al. (1993) Appl. Biochem. Biotechnol. 38:147-159).

[1071] Other methods for detecting mutations in a selected gene include methods in which protection from cleavage agents is used to detect mismatched bases in RNA/RNA or RNA/DNA heteroduplexes (Myers et al. (1985) Science 230:1242). In general, the technique of mismatch cleavage entails providing heteroduplexes formed by hybridizing (labeled) RNA or DNA containing the wild-type sequence with potentially mutant RNA or DNA obtained from a tissue sample. The double-stranded duplexes are treated with an agent which cleaves single-stranded regions of the duplex such as which will exist due to basepair mismatches between the control and sample strands. RNA/DNA duplexes can be treated with RNase to digest mismatched regions, and DNA/DNA hybrids can be treated with S1 nuclease to digest mismatched regions.

[1072] In other embodiments, either DNA/DNA or RNA/DNA duplexes can be treated with hydroxylamine or osmium tetroxide and with piperidine in order to digest mismatched regions. After digestion of the mismatched regions, the resulting material is then separated by size on denaturing polyacrylamide gels to determine the site of mutation. See, e.g., Cotton et al. (1988) Proc. Natl. Acad. Sci. USA 85:4397; Saleeba et al. (1992) Methods Enzymol. 217:286-295. In a preferred embodiment, the control DNA or RNA can be labeled for detection.

[1073] In still another embodiment, the mismatch cleavage reaction employs one or more proteins that recognize mismatched base pairs in double-stranded DNA (so called “DNA mismatch repair enzymes”) in defined systems for detecting and mapping point mutations in cDNAs obtained from samples of cells. For example, the mutY enzyme of E. coli cleaves A at G/A mismatches and the thymidine DNA glycosylase from HeLa cells cleaves T at G/T mismatches (Hsu et al. (1994) Carcinogenesis 15:1657-1662). According to an exemplary embodiment, a probe based on a selected sequence, e.g., a wild-type sequence, is hybridized to a cDNA or other DNA product from a test cell(s). The duplex is treated with a DNA mismatch repair enzyme, and the cleavage products, if any, can be detected from electrophoresis protocols or the like. See, e.g., U.S. Pat. No. 5,459,039.

[1074] In other embodiments, alterations in electrophoretic mobility will be used to identify mutations in genes. For example, single strand conformation polymorphism (SSCP) may be used to detect differences in electrophoretic mobility between mutant and wild type nucleic acids (Orita et al. (1989) Proc. Natl. Acad. Sci. USA 86:2766; see also Cotton (1993) Mutat. Res. 285:125-144; Hayashi (1992) Genet. Anal. Tech. Appl. 9:73-79). Single-stranded DNA fragments of sample and control nucleic acids will be denatured and allowed to renature. The secondary structure of single-stranded nucleic acids varies according to sequence, and the resulting alteration in electrophoretic mobility enables the detection of even a single base change. The DNA fragments may be labeled or detected with labeled probes. The sensitivity of the assay may be enhanced by using RNA (rather than DNA), in which the secondary structure is more sensitive to a change in sequence. In a preferred embodiment, the subject method utilizes heteroduplex analysis to separate double stranded heteroduplex molecules on the basis of changes in electrophoretic mobility (Keen et al. (1991) Trends Genet. 7:5).

[1075] In yet another embodiment, the movement of mutant or wild-type fragments in polyacrylamide gels containing a gradient of denaturant is assayed using denaturing gradient get electrophoresis (DGGE) (Myers et al. (1985) Nature 313:495). When DGGE is used as the method of analysis, DNA will be modified to insure that it does not completely denature, for example by adding a GC clamp of approximately 40 bp of high-melting GC-rich DNA by PCR. In a further embodiment, a temperature gradient is used in place of a denaturing gradient to identify differences in the mobility of control and sample DNA (Rosenbaum and Reissner (1987) Biophys. Chem. 265:12753).

[1076] Examples of other techniques for detecting point mutations include, but are not limited to, selective oligonucleotide hybridization, selective amplification, or selective primer extension. For example, oligonucleotide primers may be prepared in which the known mutation is placed centrally and then hybridized to target DNA under conditions which permit hybridization only if a perfect match is found (Saiki et al. (1986) Nature 324:163); Saiki et al. (1989) Proc. Natl. Acad. Sci. USA 86:6230). Such allele specific oligonucleotides are hybridized to PCR amplified target DNA or a number of different mutations when the oligonucleotides are attached to the hybridizing membrane and hybridized with labeled target DNA.

[1077] Alternatively, allele specific amplification technology which depends on selective PCR amplification may be used in conjunction with the instant invention. Oligonucleotides used as primers for specific amplification may carry the mutation of interest in the center of the molecule (so that amplification depends on differential hybridization) (Gibbs et al. (1989) Nucleic Acids Res. 17:2437-2448) or at the extreme 3′ end of one primer where, under appropriate conditions, mismatch can prevent or reduce polymerase extension (Prossner (1993) Tibtech 11:238). In addition, it may be desirable to introduce a novel restriction site in the region of the mutation to create cleavage-based detection (Gasparini et al. (1992) Mol. Cell. Probes 6:1). It is anticipated that in certain embodiments amplification may also be performed using Taq ligase for amplification (Barany (1991) Proc. Natl. Acad. Sci. USA 88:189). In such cases, ligation will occur only if there is a perfect match at the 3′ end of the 5′ sequence making it possible to detect the presence of a known mutation at a specific site by looking for the presence or absence of amplification.

[1078] The methods described herein may be performed, for example, by utilizing pre-packaged diagnostic kits comprising at least one probe nucleic acid or antibody reagent described herein, which may be conveniently used, e.g., in clinical settings to diagnose patients exhibiting symptoms or family history of a disease or illness involving a gene encoding a polypeptide of the invention. Furthermore, any cell type or tissue, preferably peripheral blood leukocytes, in which the polypeptide of the invention is expressed may be utilized in the prognostic assays described herein.

### Delta3 Pharmacogenomics

[1079] Agents, or modulators which have a stimulatory or inhibitory effect on activity or expression of a polypeptide of the invention as identified by a screening assay described herein can be administered to individuals to treat (prophylactically or therapeutically) disorders associated with aberrant activity of the polypeptide. In conjunction with such treatment, the pharmacogenomics (i.e., the study of the relationship between an individual's genotype and that individual's response to a foreign compound or drug) of the individual may be considered. Differences in metabolism of therapeutics can lead to severe toxicity or therapeutic failure by altering the relation between dose and blood concentration of the pharmacologically active drug. Thus, the pharmacogenomics of the individual permits the selection of effective agents (e.g., drugs) for prophylactic or therapeutic treatments based on a consideration of the individual's genotype. Such pharmacogenomics can further be used to determine appropriate dosages and therapeutic regimens. Accordingly, the activity of a polypeptide of the invention, expression of a nucleic acid of the invention, or mutation content of a gene of the invention in an individual can be determined to thereby select appropriate agent(s) for therapeutic or prophylactic treatment of the individual.

[1080] Pharmacogenomics deals with clinically significant hereditary variations in the response to drugs due to altered drug disposition and abnormal action in affected persons. See, e.g., Linder (1997) Clin. Chem. 43(2):254-266. In general, two types of pharmacogenetic conditions can be differentiated. Genetic conditions transmitted as a single factor altering the way drugs act on the body are referred to as “altered drug action.” Genetic conditions transmitted as single factors altering the way the body acts on drugs are referred to as “altered drug metabolism”. These pharmacogenetic conditions can occur either as rare defects or as polymorphisms. For example, glucose-6-phosphate dehydrogenase deficiency (G6PD) is a common inherited enzymopathy in which the main clinical complication is haemolysis after ingestion of oxidant drugs (anti-malarials, sulfonamides, analgesics, nitrofurans) and consumption of fava beans.

[1081] As an illustrative embodiment, the activity of drug metabolizing enzymes is a major determinant of both the intensity and duration of drug action. The discovery of genetic polymorphisms of drug metabolizing enzymes (e.g., N-acetyltransferase 2 (NAT 2) and cytochrome P450 enzymes CYP2D6 and CYP2C19) has provided an explanation as to why some patients do not obtain the expected drug effects or show exaggerated drug response and serious toxicity after taking the standard and safe dose of a drug. These polymorphisms are expressed in two phenotypes in the population, the extensive metabolizer (EM) and poor metabolizer (PM). The prevalence of PM is different among different populations. For example, the gene coding for CYP2D6 is highly polymorphic and several mutations have been identified in PM, which all lead to the absence of functional CYP2D6. Poor metabolizers of CYP2D6 and CYP2C19 quite frequently experience exaggerated drug response and side effects when they receive standard doses. If a metabolite is the active therapeutic moiety, a PM will show no therapeutic response, as demonstrated for the analgesic effect of codeine mediated by its CYP2D6-formed metabolite morphine. The other extreme are the so called ultra-rapid metabolizers who do not respond to standard doses. Recently, the molecular basis of ultra-rapid metabolism has been identified to be due to CYP2D6 gene amplification.

[1082] Thus, the activity of a polypeptide of the invention, expression of a nucleic acid encoding the polypeptide, or mutation content of a gene encoding the polypeptide in an individual can be determined to thereby select appropriate agent(s) for therapeutic or prophylactic treatment of the individual. In addition, pharmacogenetic studies can be used to apply genotyping of polymorphic alleles encoding drug-metabolizing enzymes to the identification of an individual's drug responsiveness phenotype. This knowledge, when applied to dosing or drug selection, can avoid adverse reactions or therapeutic failure and thus enhance therapeutic or prophylactic efficiency when treating a subject with a modulator of activity or expression of the polypeptide, such as a modulator identified by one of the exemplary screening assays described herein.

### Delta3 Monitoring of Effects During Clinical Trials

[1083] Monitoring the influence of agents (e.g., drugs, compounds) on the expression or activity of a polypeptide of the invention (e.g., the ability to modulate aberrant cell proliferation chemotaxis, and/or differentiation) can be applied not only in basic drug screening, but also in clinical trials. For example, the effectiveness of an agent, as determined by a screening assay as described herein, to increase gene expression, protein levels or protein activity, can be monitored in clinical trials of subjects exhibiting decreased gene expression, protein levels, or protein activity. Alternatively, the effectiveness of an agent, as determined by a screening assay, to decrease gene expression, protein levels or protein activity, can be monitored in clinical trials of subjects exhibiting increased gene expression, protein levels, or protein activity. In such clinical trials, expression or activity of a polypeptide of the invention and preferably, that of other polypeptide that have been implicated in for example, a cellular proliferation disorder, can be used as a marker of the immune responsiveness of a particular cell.

[1084] For example, and not by way of limitation, genes, including those of the invention, that are modulated in cells by treatment with an agent (e.g., compound, drug or small molecule) which modulates activity or expression of a polypeptide of the invention (e.g., as identified in a screening assay described herein) can be identified. Thus, to study the effect of agents on cellular proliferation disorders, for example, in a clinical trial, cells can be isolated and RNA prepared and analyzed for the levels of expression of a gene of the invention and other genes implicated in the disorder. The levels of gene expression (i.e., a gene expression pattern) can be quantified by Northern blot analysis or RT-PCR, as described herein, or alternatively by measuring the amount of protein produced, by one of the methods as described herein, or by measuring the levels of activity of a gene of the invention or other genes. In this way, the gene expression pattern can serve as a marker, indicative of the physiological response of the cells to the agent. Accordingly, this response state may be determined before, and at various points during, treatment of the individual with the agent.

[1085] In a preferred embodiment, the present invention provides a method for monitoring the effectiveness of treatment of a subject with an agent (e.g., an agonist, antagonist, peptidomimetic, protein, peptide, nucleic acid, small molecule, or other drug candidate identified by the screening assays described herein) comprising the steps of (i) obtaining a pre-administration sample from a subject prior to administration of the agent; (ii) detecting the level of the polypeptide or nucleic acid of the invention in the preadministration sample; (iii) obtaining one or more post-administration samples from the subject; (iv) detecting the level the of the polypeptide or nucleic acid of the invention in the post-administration samples; (v) comparing the level of the polypeptide or nucleic acid of the invention in the pre-administration sample with the level of the polypeptide or nucleic acid of the invention in the post-administration sample or samples; and (vi) altering the administration of the agent to the subject accordingly. For example, increased administration of the agent may be desirable to increase the expression or activity of the polypeptide to higher levels than detected, i.e., to increase the effectiveness of the agent. Alternatively, decreased administration of the agent may be desirable to decrease expression or activity of the polypeptide to lower levels than detected, i.e., to decrease the effectiveness of the agent.

### Delta3 Transgenic Animals

[1086] These systems may be used in a variety of applications. For example, the cell- and animal-based model systems may be used to further characterize Delta3 genes and proteins. In addition, such assays may be utilized as part of screening strategies designed to identify compounds which are capable of ameliorating disease symptoms. Thus, the animal- and cell-based models may be used to identify drugs, pharmaceuticals, therapies and interventions which may be effective in treating disease.

### Delta3 Animal-Based Systems

[1087] One aspect of the present invention concerns transgenic animals which are comprised of cells (of that animal) which contain a transgene of the present invention and which preferably (though optionally) express an exogenous Delta3 protein in one or more cells in the animal. A Delta3 transgene can encode the wild-type form of the protein, or can encode homologs thereof, including both alleles of Delta3 genes, agonists and antagonists, as well as antisense constructs. In preferred embodiments, the expression of the transgene is restricted to specific subsets of cells, tissues or developmental stages utilizing, for example, cis-acting sequences that control expression in the desired pattern. In the present invention, such mosaic expression of a Delta3 protein can be essential for many forms of lineage analysis and can additionally provide a means to assess the effects of, for example, lack of Delta3 expression which might grossly alter development in small patches of tissue within an otherwise normal embryo. In a preferred embodiment, the invention provides transgenic mice having an allele of hDelta3 gene which is associated with ACCPN and the mouse can be used, e.g., to determine the effect of this specific hDelta3 allele. Toward this and, tissue-specific regulatory sequences and conditional regulatory sequences can be used to control expression of the transgene in certain spatial patterns. Moreover, temporal patterns of expression can be provided by, for example, conditional recombination systems or prokaryotic transcriptional regulatory sequences.

[1088] Genetic techniques which allow for the expression of transgenes can be regulated via site-specific genetic manipulation in vivo are known to those skilled in the art. For instance, genetic systems are available which allow for the regulated expression of a recombinase that catalyzes the genetic recombination a target sequence. As used herein, the phrase “target sequence” refers to a nucleotide sequence that is genetically recombined by a recombinase. The target sequence is flanked by recombinase recognition sequences and is generally either excised or inverted in cells expressing recombinase activity. Recombinase catalyzed recombination events can be designed such that recombination of the target sequence results in either the activation or repression of expression of one of the subject Delta3 proteins. For example, excision of a target sequence which interferes with the expression of a recombinant Delta3 gene, such as one which encodes an antagonistic homolog or an antisense transcript, can be designed to activate expression of that gene. This interference with expression of the protein can result from a variety of mechanisms, such as spatial separation of the Delta3 gene from the promoter element or an internal stop codon. Moreover, the transgene can be made wherein the coding sequence of the gene is flanked by recombinase recognition sequences and is initially transfected into cells in a 3′ to 5′ orientation with respect to the promoter element. In such an instance, inversion of the target sequence will reorient the subject gene by placing the 5′ end of the coding sequence in an orientation with respect to the promoter element which allow for promoter driven transcriptional activation.

[1089] The transgenic animals of the present invention all include within a plurality of their cells a transgene of the present invention, which transgene alters the phenotype of the “host cell” with respect to regulation of cell growth, death and/or differentiation. Since it is possible to produce transgenic organisms of the invention utilizing one or more of the transgene constructs described herein, a general description will be given of the production of transgenic organisms by referring generally to exogenous genetic material. This general description can be adapted by those skilled in the art in order to incorporate specific transgene sequences into organisms utilizing the methods and materials described below.

[1090] In an illustrative embodiment, either the cre/loxP recombinase system of bacteriophage P1 (Lakso et al. (1992) PNAS 89:6232-6236; Orban et al. (1992) PNAS 89:6861-6865) or the FLP recombinase system of Saccharomyces cerevisiae (O'Gorman et al. (1991) Science 251:1351-1355; PCT publication WO 92/15694) can be used to generate in vivo site-specific genetic recombination systems. Cre recombinase catalyzes the site-specific recombination of an intervening target sequence located between loxP sequences. loxP sequences are 34 base pair nucleotide repeat sequences to which the Cre recombinase binds and are required for Cre recombinase mediated genetic recombination. The orientation of loxP sequences determines whether the intervening target sequence is excised or inverted when Cre recombinase is present (Abremski et al. (1984) J. Biol. Chem. 259:1509-1514); catalyzing the excision of the target sequence when the loxP sequences are oriented as direct repeats and catalyzes inversion of the target sequence when loxP sequences are oriented as inverted repeats.

[1091] Accordingly, genetic recombination of the target sequence is dependent on expression of the Cre recombinase. Expression of the recombinase can be regulated by promoter elements which are subject to regulatory control, e.g., tissue-specific, developmental stage-specific, inducible or repressible by externally added agents. This regulated control will result in genetic recombination of the target sequence only in cells where recombinase expression is mediated by the promoter element. Thus, the activation expression of a recombinant Delta3 protein can be regulated via control of recombinase expression.

[1092] Use of the cre/loxP recombinase system to regulate expression of a recombinant Delta3 protein requires the construction of a transgenic animal containing transgenes encoding both the Cre recombinase and the subject protein. Animals containing both the Cre recombinase and a recombinant Delta3 gene can be provided through the construction of “double” transgenic animals. A convenient method for providing such animals is to mate two transgenic animals each containing a transgene, e.g., a Delta3 gene and recombinase gene.

[1093] One advantage derived from initially constructing transgenic animals containing a Delta3 transgene in a recombinase-mediated expressible format derives from the likelihood that the subject protein, whether agonistic or antagonistic, can be deleterious upon expression in the transgenic animal. In such an instance, a founder population, in which the subject transgene is silent in all tissues, can be propagated and maintained. Individuals of this founder population can be crossed with animals expressing the recombinase in, for example, one or more tissues and/or a desired temporal pattern. Thus, the creation of a founder population in which, for example, an antagonistic Delta3 transgene is silent will allow the study of progeny from that founder in which disruption of Delta3 mediated induction in a particular tissue or at certain developmental stages would result in, for example, a lethal phenotype.

[1094] Similar conditional transgenes can be provided using prokaryotic promoter sequences which require prokaryotic proteins to be simultaneous expressed in order to facilitate expression of the Delta3 transgene. Exemplary promoters and the corresponding trans-activating prokaryotic proteins are given in U.S. Pat. No. 4,833,080.

[1095] Moreover, expression of the conditional transgenes can be induced by gene therapy-like methods wherein a gene encoding the trans-activating protein, e.g., a recombinase or a prokaryotic protein, is delivered to the tissue and caused to be expressed, such as in a cell-type specific manner. By this method, a Delta3 transgene could remain silent into adulthood until “turned on” by the introduction of the trans-activator.

[1096] In an exemplary embodiment, the “transgenic non-human animals” of the invention are produced by introducing transgenes into the germline of the non-human animal. Embryonal target cells at various developmental stages can be used to introduce transgenes. Different methods are used depending on the stage of development of the embryonal target cell. The specific line(s) of any animal used to practice this invention are selected for general good health, good embryo yields, good pronuclear visibility in the embryo, and good reproductive fitness. In addition, the haplotype is a significant factor. For example, when transgenic mice are to be produced, strains such as C57BL/6 or FVB lines are often used (Jackson Laboratory, Bar Harbor, Me.). Preferred strains are those with H-2b, H-2d or H-2q haplotypes such as C57BL/6 or DBA/1. The line(s) used to practice this invention may themselves be transgenics, and/or may be knockouts (i.e., obtained from animals which have one or more genes partially or completely suppressed).

[1097] In one embodiment, the transgene construct is introduced into a single stage embryo. The zygote is the best target for micro-injection. In the mouse, the male pronucleus reaches the size of approximately 20 micrometers in diameter which allows reproducible injection of 1-2 μl of DNA solution. The use of zygotes as a target for gene transfer has a major advantage in that in most cases the injected DNA will be incorporated into the host gene before the first cleavage (Brinster et al. (1985) PNAS 82:4438-4442). As a consequence, all cells of the transgenic animal will carry the incorporated transgene. This will in general also be reflected in the efficient transmission of the transgene to offspring of the founder since 50% of the germ cells will harbor the transgene.

[1098] Normally, fertilized embryos are incubated in suitable media until the pronuclei appear. At about this time, the nucleotide sequence comprising the transgene is introduced into the female or male pronucleus as described below. In some species such as mice, the male pronucleus is preferred. It is most preferred that the exogenous genetic material be added to the male DNA complement of the zygote prior to its being processed by the ovum nucleus or the zygote female pronucleus. It is thought that the ovum nucleus or female pronucleus release molecules which affect the male DNA complement, perhaps by replacing the protamines of the male DNA with histones, thereby facilitating the combination of the female and male DNA complements to form the diploid zygote.

[1099] Thus, it is preferred that the exogenous genetic material be added to the male complement of DNA or any other complement of DNA prior to its being affected by the female pronucleus. For example, the exogenous genetic material is added to the early male pronucleus, as soon as possible after the formation of the male pronucleus, which is when the male and female pronuclei are well separated and both are located close to the cell membrane. Alternatively, the exogenous genetic material could be added to the nucleus of the sperm after it has been induced to undergo decondensation. Sperm containing the exogenous genetic material can then be added to the ovum or the decondensed sperm could be added to the ovum with the transgene constructs being added as soon as possible thereafter.

[1100] Introduction of the transgene nucleotide sequence into the embryo may be accomplished by any means known in the art such as, for example, microinjection, electroporation, or lipofection. Following introduction of the transgene nucleotide sequence into the embryo, the embryo may be incubated in vitro for varying amounts of time, or reimplanted into the surrogate host, or both. In vitro incubation to maturity is within the scope of this invention. One common method in to incubate the embryos in vitro for about 1-7 days, depending on the species, and then reimplant them into the surrogate host.

[1101] For the purposes of this invention a zygote is essentially the formation of a diploid cell which is capable of developing into a complete organism. Generally, the zygote will be comprised of an egg containing a nucleus formed, either naturally or artificially, by the fusion of two haploid nuclei from a gamete or gametes. Thus, the gamete nuclei must be ones which are naturally compatible, i.e., ones which result in a viable zygote capable of undergoing differentiation and developing into a functioning organism. Generally, a euploid zygote is preferred. If an aneuploid zygote is obtained, then the number of chromosomes should not vary by more than one with respect to the euploid number of the organism from which either gamete originated.

[1102] In addition to similar biological considerations, physical ones also govern the amount (e.g., volume) of exogenous genetic material which can be added to the nucleus of the zygote or to the genetic material which forms a part of the zygote nucleus. If no genetic material is removed, then the amount of exogenous genetic material which can be added is limited by the amount which will be absorbed without being physically disruptive. Generally, the volume of exogenous genetic material inserted will not exceed about 10 picoliters. The physical effects of addition must not be so great as to physically destroy the viability of the zygote. The biological limit of the number and variety of DNA sequences will vary depending upon the particular zygote and functions of the exogenous genetic material and will be readily apparent to one skilled in the art, because the genetic material, including the exogenous genetic material, of the resulting zygote must be biologically capable of initiating and maintaining the differentiation and development of the zygote into a functional organism.

[1103] The number of copies of the transgene constructs which are added to the zygote is dependent upon the total amount of exogenous genetic material added and will be the amount which enables the genetic transformation to occur. Theoretically only one copy is required; however, generally, numerous copies are utilized, for example, 1,000-20,000 copies of the transgene construct, in order to insure that one copy is functional. As regards the present invention, there will often be an advantage to having more than one functioning copy of each of the inserted exogenous DNA sequences to enhance the phenotypic expression of the exogenous DNA sequences.

[1104] Any technique which allows for the addition of the exogenous genetic material into nucleic genetic material can be utilized so long as it is not destructive to the cell, nuclear membrane or other existing cellular or genetic structures. The exogenous genetic material is preferentially inserted into the nucleic genetic material by microinjection. Microinjection of cells and cellular structures is known and is used in the art.

[1105] Reimplantation is accomplished using standard methods. Usually, the surrogate host is anesthetized, and the embryos are inserted into the oviduct. The number of embryos implanted into a particular host will vary by species, but will usually be comparable to the number of off spring the species naturally produces.

[1106] Transgenic offspring of the surrogate host may be screened for the presence and/or expression of the transgene by any suitable method. Screening is often accomplished by Southern blot or Northern blot analysis, using a probe that is complementary to at least a portion of the transgene. Western blot analysis using an antibody against the protein encoded by the transgene may be employed as an alternative or additional method for screening for the presence of the transgene product. Typically, DNA is prepared from tail tissue and analyzed by Southern analysis or PCR for the transgene. Alternatively, the tissues or cells believed to express the transgene at the highest levels are tested for the presence and expression of the transgene using Southern analysis or PCR, although any tissues or cell types may be used for this analysis.

[1107] Alternative or additional methods for evaluating the presence of the transgene include, without limitation, suitable biochemical assays such as enzyme and/or immunological assays, histological stains for particular marker or enzyme activities, flow cytometric analysis, and the like. Analysis of the blood may also be useful to detect the presence of the transgene product in the blood, as well as to evaluate the effect of the transgene on the levels of various types of blood cells and other blood constituents.

[1108] Progeny of the transgenic animals may be obtained by mating the transgenic animal with a suitable partner, or by in vitro fertilization of eggs and/or sperm obtained from the transgenic animal. Where mating with a partner is to be performed, the partner may or may not be transgenic and/or a knockout; where it is transgenic, it may contain the same or a different transgene, or both. Alternatively, the partner may be a parental line. Where in vitro fertilization is used, the fertilized embryo may be implanted into a surrogate host or incubated in vitro, or both. Using either method, the progeny may be evaluated for the presence of the transgene using methods described above, or other appropriate methods.

[1109] The transgenic animals produced in accordance with the present invention will include exogenous genetic material. As set out above, the exogenous genetic material will, in certain embodiments, be a DNA sequence which results in the production of a Delta3 protein (either agonistic or antagonistic), and antisense transcript, or a Delta3 mutant. Further, in such embodiments the sequence will be attached to a transcriptional control element, e.g., a promoter, which preferably allows the expression of the transgene product in a specific type of cell.

[1110] Retroviral infection can also be used to introduce transgene into a non-human animal. The developing non-human embryo can be cultured in vitro to the blastocyst stage. During this time, the blastomeres can be targets for retroviral infection (Jaenich, R. (1976) PNAS 73:1260-1264). Efficient infection of the blastomeres is obtained by enzymatic treatment to remove the zona pellucida (Manipulating the Mouse Embryo, Hogan eds. (Cold Spring Harbor Laboratory Press, Cold Spring Harbor, 1986). The viral vector system used to introduce the transgene is typically a replication-defective retrovirus carrying the transgene (Jahner et al. (1985) PNAS 82:6927-6931; Van der Putten et al. (1985) PNAS 82:6148-6152). Transfection is easily and efficiently obtained by culturing the blastomeres on a monolayer of virus-producing cells (Van der Putten et al. (1985) PNAS 82:6148-6152; Stewart et al. (1987) EMBO J. 6:383-388). Alternatively, infection can be performed at a later stage. Virus or virus-producing cells can be injected into the blastocoele (Jahner et al. (1982) Nature 298:623-628). Most of the founders will be mosaic for the transgene since incorporation occurs only in a subset of the cells which formed the transgenic non-human animal. Further, the founder may contain various retroviral insertions of the transgene at different positions in the genome which generally will segregate in the offspring. In addition, it is also possible to introduce transgenes into the germ line by intrauterine retroviral infection of the midgestation embryo (Jahner et al. (1982) Nature 298:623-628).

[1111] A third type of target cell for transgene introduction is the embryonal stem cell (ES). ES cells are obtained from pre-implantation embryos cultured in vitro and fused with embryos (Evans et al. (1981) Nature 292:154-156; Bradley et al. (1984) Nature 309:255-258; Gossler et al. (1986) PNAS 83: 9065-9069; and Robertson et al. (1986) Nature 322:445-448). Transgenes can be efficiently introduced into the ES cells by DNA transfection or by retrovirus-mediated transduction. Such transformed ES cells can thereafter be combined with blastocysts from a non-human animal. The ES cells thereafter colonize the embryo and contribute to the germ line of the resulting chimeric animal. For review see Jaenisch, R. (1988) Science 240:1468-1474.

[1112] In one embodiment, gene targeting, which is a method of using homologous recombination to modify an animal's genome, can be used to introduce changes into cultured embryonic stem cells. By targeting a Delta3 gene of interest in ES cells, these changes can be introduced into the germlines of animals to generate chimeras. The gene targeting procedure is accomplished by introducing into tissue culture cells a DNA targeting construct that includes a segment homologous to a target Delta3 locus, and which also includes an intended sequence modification to the Delta3 genomic sequence (e.g., insertion, deletion, point mutation). The treated cells are then screened for accurate targeting to identify and isolate those which have been properly targeted.

[1113] Gene targeting in embryonic stem cells is in fact a scheme contemplated by the present invention as a means for disrupting a Delta3 gene function through the use of a targeting transgene construct designed to undergo homologous recombination with one or more Delta3 genomic sequences. The targeting construct can be arranged so that, upon recombination with an element of a Delta3 gene, a positive selection marker is inserted into (or replaces) coding sequences of the targeted Delta3 gene. The inserted sequence functionally disrupts the Delta3 gene, while also providing a positive selection trait. Exemplary Delta3 targeting constructs are described in more detail below.

[1114] Generally, the embryonic stem cells (ES cells) used to produce the knockout animals will be of the same species as the knockout animal to be generated. Thus for example, mouse embryonic stem cells will usually be used for generation of knockout mice.

[1115] Embryonic stem cells are generated and maintained using methods well known to the skilled artisan such as those described by Doetschman et al. (1985) J. Embryol. Exp. Morphol. 87:27-45). Any line of ES cells can be used, however, the line chosen is typically selected for the ability of the cells to integrate into and become part of the germ line of a developing embryo so as to create germ line transmission of the knockout construct. Thus, any ES cell line that is believed to have this capability is suitable for use herein. One mouse strain that is typically used for production of ES cells, is the 129J strain. Another ES cell line is murine cell line D3 (American Type Culture Collection, catalog NO: CKL 1934) Still another preferred ES cell line is the WW6 cell line (Ioffe et al. (1995) PNAS 92:7357-7361). The cells are cultured and prepared for knockout construct insertion using methods well known to the skilled artisan, such as those set forth by Robertson in: Teratocarcinomas and Embryonic Stem Cells: A Practical Approach, E. J. Robertson, ed. IRL Press, Washington, D.C. [1987]); by Bradley et al. (1986) Current Topics in Devel. Biol. 20:357-371); and by Hogan et al. (Manipulating the Mouse Embryo: A Laboratory Manual, Cold Spring Harbor Laboratory Press, Cold Spring Harbor, N.Y. [1986]).

[1116] Insertion of the knockout construct into the ES cells can be accomplished using a variety of methods well known in the art including for example, electroporation, microinjection, and calcium phosphate treatment. A preferred method of insertion is electroporation.

[1117] Each knockout construct to be inserted into the cell must first be in the linear form. Therefore, if the knockout construct has been inserted into a vector (described infra), linearization is accomplished by digesting the DNA with a suitable restriction endonuclease selected to cut only within the vector sequence and not within the knockout construct sequence.

[1118] For insertion, the knockout construct is added to the ES cells under appropriate conditions for the insertion method chosen, as is known to the skilled artisan. Where more than one construct is to be introduced into the ES cell, each knockout construct can be introduced simultaneously or one at a time.

[1119] If the ES cells are to be electroporated, the ES cells and knockout construct DNA are exposed to an electric pulse using an electroporation machine and following the manufacturer's guidelines for use. After electroporation, the ES cells are typically allowed to recover under suitable incubation conditions. The cells are then screened for the presence of the knockout construct.

[1120] Screening can be accomplished using a variety of methods. Where the marker gene is an antibiotic resistance gene, for example, the ES cells may be cultured in the presence of an otherwise lethal concentration of antibiotic. Those ES cells that survive have presumably integrated the knockout construct. If the marker gene is other than an antibiotic resistance gene, a Southern blot of the ES cell genomic DNA can be probed with a sequence of DNA designed to hybridize only to the marker sequence Alternatively, PCR can be used. Finally, if the marker gene is a gene that encodes an enzyme whose activity can be detected (e.g., b-galactosidase), the enzyme substrate can be added to the cells under suitable conditions, and the enzymatic activity can be analyzed. One skilled in the art will be familiar with other useful markers and the means for detecting their presence in a given cell. All such markers are contemplated as being included within the scope of the teaching of this invention.

[1121] The knockout construct may integrate into several locations in the ES cell genome, and may integrate into a different location in each ES cell's genome due to the occurrence of random insertion events. The desired location of insertion is in a complementary position to the DNA sequence to be knocked out, e.g., the Delta3 coding sequence, transcriptional regulatory sequence, etc. Typically, less than about 1-5% of the ES cells that take up the knockout construct will actually integrate the knockout construct in the desired location. To identify those ES cells with proper integration of the knockout construct, total DNA can be extracted from the ES cells using standard methods. The DNA can then be probed on a Southern blot with a probe or probes designed to hybridize in a specific pattern to genomic DNA digested with particular restriction enzyme(s). Alternatively, or additionally, the genomic DNA can be amplified by PCR with probes specifically designed to amplify DNA fragments of a particular size and sequence (i.e., only those cells containing the knockout construct in the proper position will generate DNA fragments of the proper size).

[1122] After suitable ES cells containing the knockout construct in the proper location have been identified, the cells can be inserted into an embryo. Insertion may be accomplished in a variety of ways known to the skilled artisan, however a preferred method is by microinjection. For microinjection, about 10-30 cells are collected into a micropipet and injected into embryos that are at the proper stage of development to permit integration of the foreign ES cell containing the knockout construct into the developing embryo. For instance, as the appended Examples describe, the transformed ES cells can be microinjected into blastocytes.

[1123] The suitable stage of development for the embryo used for insertion of ES cells is very species dependent, however for mice it is about 3.5 days. The embryos are obtained by perfusing the uterus of pregnant females. Suitable methods for accomplishing this are known to the skilled artisan, and are set forth by, e.g., et al. (1986) Current Topics in Devel. Biol. 20:357-371.

[1124] While any embryo of the right stage of development is suitable for use, preferred embryos are male. In mice, the preferred embryos also have genes coding for a coat color that is different from the coat color encoded by the ES cell genes. In this way, the offspring can be screened easily for the presence of the knockout construct by looking for mosaic coat color (indicating that the ES cell was incorporated into the developing embryo). Thus, for example, if the ES cell line carries the genes for white fur, the embryo selected will carry genes for black or brown fur.

[1125] After the ES cell has been introduced into the embryo, the embryo may be implanted into the uterus of a pseudopregnant foster mother for gestation. While any foster mother may be used, the foster mother is typically selected for her ability to breed and reproduce well, and for her ability to care for the young. Such foster mothers are typically prepared by mating with vasectomized males of the same species. The stage of the pseudopregnant foster mother is important for successful implantation, and it is species dependent. For mice, this stage is about 2-3 days pseudopregnant.

[1126] Offspring that are born to the foster mother may be screened initially for mosaic coat color where the coat color selection strategy (as described above, and in the appended examples) has been employed. In addition, or as an alternative, DNA from tail tissue of the offspring may be screened for the presence of the knockout construct using Southern blots and/or PCR as described above. Offspring that appear to be mosaics may then be crossed to each other, if they are believed to carry the knockout construct in their germ line, in order to generate homozygous knockout animals. Homozygotes may be identified by Southern blotting of equivalent amounts of genomic DNA from mice that are the product of this cross, as well as mice that are known heterozygotes and wild type mice.

[1127] Other means of identifying and characterizing the knockout offspring are available. For example, Northern blots can be used to probe the mRNA for the presence or absence of transcripts encoding either the gene knocked out, the marker gene, or both. In addition, Western blots can be used to assess the level of expression of the Delta3 gene knocked out in various tissues of the offspring by probing the Western blot with an antibody against the particular Delta3 protein, or an antibody against the marker gene product, where this gene is expressed. Finally, in situ analysis (such as fixing the cells and labeling with antibody) and/or FACS (fluorescence activated cell sorting) analysis of various cells from the offspring can be conducted using suitable antibodies to look for the presence or absence of the knockout construct gene product.

[1128] Yet other methods of making knock-out or disruption transgenic animals are also generally known. See, for example, Manipulating the Mouse Embryo, (Cold Spring Harbor Laboratory Press, Cold Spring Harbor, N.Y., 1986). Recombinase dependent knockouts can also be generated, e.g., by homologous recombination to insert target sequences, such that tissue specific and/or temporal control of inactivation of a Delta-gene can be controlled by recombinase sequences (described infra).

[1129] Animals containing more than one knockout construct and/or more than one transgene expression construct are prepared in any of several ways. The preferred manner of preparation is to generate a series of mammals, each containing one of the desired transgenic phenotypes. Such animals are bred together through a series of crosses, backcrosses and selections, to ultimately generate a single animal containing all desired knockout constructs and/or expression constructs, where the animal is otherwise congenic (genetically identical) to the wild type except for the presence of the knockout construct(s) and/or transgene(s).

[1130] The present invention is further illustrated by the following examples which should not be construed as limiting in any way. The contents of all cited references (including literature references, issued patents, published patent applications as cited throughout this application are hereby expressly incorporated by reference. The practice of the present invention will employ, unless otherwise indicated, conventional techniques of cell biology, cell culture, molecular biology, transgenic biology, microbiology, recombinant DNA, and immunology, which are within the skill of the art. Such techniques are explained fully in the literature. See, for example, Molecular Cloning A Laboratory Manual, 2nd Ed., ed. by Sambrook, Fritsch and Maniatis (Cold Spring Harbor Laboratory Press: 1989); DNA Cloning, Volumes I and II (D. N. Glover ed., 1985); Oligonucleotide Synthesis (M. J. Gait ed., 1984); Mullis et al. U.S. Pat. No. 4,683,195; Nucleic Acid Hybridization (B. D. Hames & S. J. Higgins eds. 1984); Transcription And Translation (B. D. Hames & S. J. Higgins eds. 1984); Culture Of Animal Cells (R. I. Freshney, Alan R. Liss, Inc., 1987); Immobilized Cells And Enzymes (IRL Press, 1986); B. Perbal, A Practical Guide To Molecular Cloning (1984); the treatise, Methods In Enzymology (Academic Press, Inc., N.Y.); Gene Transfer Vectors For Mammalian Cells (J. H. Miller and M. P. Calos eds., 1987, Cold Spring Harbor Laboratory); Methods In Enzymology, Vols. 154 and 155 (Wu et al. eds.), Immunochemical Methods In Cell And Molecular Biology (Mayer and Walker, eds., Academic Press, London, 1987); Handbook Of Experimental Immunology, Volumes I-IV (D. M. Weir and C. C. Blackwell, eds., 1986); Manipulating the Mouse Embryo, (Cold Spring Harbor Laboratory Press, Cold Spring Harbor, N.Y., 1986).

### Electronic Apparatus Readable Media and Arrays

[1131] Electronic apparatus readable media comprising the SPOIL molecules of the present invention is also provided. As used herein, “electronic apparatus readable media” refers to any suitable medium for storing, holding or containing data or information that can be read and accessed directly by an electronic apparatus. Such media can include, but are not limited to: magnetic storage media, such as floppy discs, hard disc storage medium, and magnetic tape; optical storage media such as compact disc; electronic storage media such as RAM, ROM, EPROM, EEPROM and the like; general hard disks and hybrids of these categories such as magnetic/optical storage media. The medium is adapted or configured for having recorded thereon a marker of the present invention.

[1132] As used herein, the term “electronic apparatus” is intended to include any suitable computing or processing apparatus or other device configured or adapted for storing data or information. Examples of electronic apparatus suitable for use with the present invention include stand-alone computing apparatus; networks, including a local area network (LAN), a wide area network (WAN) Internet, Intranet, and Extranet; electronic appliances such as a personal digital assistants (PDAs), cellular phone, pager and the like; and local and distributed processing systems.

[1133] As used herein, “recorded” refers to a process for storing or encoding information on the electronic apparatus readable medium. Those skilled in the art can readily adopt any of the presently known methods for recording information on known media to generate manufactures comprising the SPOIL molecules of the present invention.

[1134] A variety of software programs and formats can be used to store the marker information of the present invention on the electronic apparatus readable medium. For example, the nucleic acid sequence corresponding to the SPOIL molecules can be represented in a word processing text file, formatted in commercially-available software such as WordPerfect and MicroSoft Word, or represented in the form of an ASCII file, stored in a database application, such as DB2, Sybase, Oracle, or the like, as well as in other forms. Any number of dataprocessor structuring formats (e.g., text file or database) may be employed in order to obtain or create a medium having recorded thereon the SPOIL molecules of the present invention.

[1135] By providing the SPOIL molecules of the invention in readable form, one can routinely access the marker sequence information for a variety of purposes. For example, one skilled in the art can use the nucleotide or amino acid sequences of the present invention in readable form to compare a target sequence or target structural motif with the sequence information stored within the data storage means. Search means are used to identify fragments or regions of the sequences of the invention which match a particular target sequence or target motif.

[1136] The present invention therefore provides a medium for holding instructions for performing a method for determining whether a subject has a bone metabolism disorder, an inflammatory disorder, or an immune disorder or a pre-disposition to a bone metabolism disorder, an inflammatory disorder, or an immune disorder, wherein the method comprises the steps of determining the presence, absence, or aberrant production of a SPOIL molecule or a SPOIL variant and based on the presence, absence or aberrant production of a SPOIL molecule or a SPOIL variant, determining whether the subject has a bone metabolism disorder, an inflammatory disorder, or an immune disorder or a pre-disposition to a bone metabolism disorder, an inflammatory disorder, or an immune disorder and/or recommending a particular treatment for the bone metabolism disorder, an inflammatory disorder, or an immune disorder.

[1137] The present invention therefore provides a medium for holding instructions for performing a method for determining whether a subject has a bone metabolism disorder, an inflammatory disorder, or an immune disorder or a pre-disposition to a bone metabolism disorder, an inflammatory disorder, or an immune disorder, wherein the method comprises the steps of determining the presence, absence, or aberrant production of a SPOIL molecule or a SPOIL variant and based on the presence, absence or aberrant production of a SPOIL molecule or a SPOIL variant, determining whether the subject has a bone metabolism disorder, an inflammatory disorder, or an immune disorder or a pre-disposition to a bone metabolism disorder, an inflammatory disorder, or an immune disorder and/or recommending a particular treatment for the bone metabolism disorder, an inflammatory disorder, or an immune disorder. The method may further comprise the step of receiving phenotypic information associated with the subject and/or acquiring from a network phenotypic information associated with the subject.

[1138] The present invention also provides in a network, a method for determining whether a subject has a hematological disorder or a pre-disposition to a bone metabolism disorder, an inflammatory disorder, or an immune disorder or a pre-disposition to a bone metabolism disorder, an inflammatory disorder, or an immune disorder associated with the SPOIL molecules, said method comprising the steps of receiving information associated with the SPOIL molecule, receiving phenotypic information associated with the subject, acquiring information from the network corresponding to the SPOIL molecule and its associated disorders, and based on one or more of the phenotypic information, the SPOIL molecule, and the acquired information, determining whether the subject has a bone metabolism disorder, an inflammatory disorder, or an immune disorder or a pre-disposition to a bone metabolism disorder, an inflammatory disorder, or an immune disorder. The method may further comprise the step of recommending a particular treatment for the bone metabolism disorder, the inflammatory disorder, or the immune disorder or a pre-disposition to the bone metabolism disorder, the inflammatory disorder, or the immune disorder.

[1139] The present invention also provides a business method for determining whether a subject has a bone metabolism disorder, an inflammatory disorder, or an immune disorder or a pre-disposition to a bone metabolism disorder, an inflammatory disorder, or an immune disorder, said method comprising the steps of receiving information associated with the SPOIL molecules, receiving phenotypic information associated with the subject, acquiring information from the network corresponding to the SPOIL molecules and its associated disorders, and based on one or more of the phenotypic information, the SPOIL molecule, and the acquired information, determining whether the subject has a bone metabolism disorder, an inflammatory disorder, or an immune disorder or a pre-disposition to a bone metabolism disorder, an inflammatory disorder, or an immune disorder. The method may further comprise the step of recommending a particular treatment for the bone metabolism disorder, the inflammatory disorder, or the immune disorder or a pre-disposition to the bone metabolism disorder, the inflammatory disorder, or the immune disorder.

[1140] The invention also includes an array comprising a SPOIL molecule of the present invention. The array can be used to assay expression of one or more genes in the array. In one embodiment, the array can be used to assay gene expression in a tissue to ascertain tissue specificity of genes in the array. In this manner, up to about 7600 genes can be simultaneously assayed for expression. This allows a profile to be developed showing a battery of genes specifically expressed in one or more tissues.

[1141] In addition to such qualitative determination, the invention allows the quantitation of gene expression. Thus, not only tissue specificity, but also the level of expression of a battery of genes in the tissue is ascertainable. Thus, genes can be grouped on the basis of their tissue expression per se and level of expression in that tissue. This is useful, for example, in ascertaining the relationship of gene expression between or among tissues. Thus, one tissue can be perturbed and the effect on gene expression in a second tissue can be determined. In this context, the effect of one cell type on another cell type in response to a biological stimulus can be determined. Such a determination is useful, for example, to know the effect of cell-cell interaction at the level of gene expression. If an agent is administered therapeutically to treat one cell type but has an undesirable effect on another cell type, the invention provides an assay to determine the molecular basis of the undesirable effect and thus provides the opportunity to co-administer a counteracting agent or otherwise treat the undesired effect. Similarly, even within a single cell type, undesirable biological effects can be determined at the molecular level. Thus, the effects of an agent on expression of other than the target gene can be ascertained and counteracted.

[1142] In another embodiment, the array can be used to monitor the time course of expression of one or more genes in the array. This can occur in various biological contexts, as disclosed herein, for example development of hematological disorder, progression of hematological disorder, and processes, such a cellular transformation associated with hematological disorder.

[1143] The array is also useful for ascertaining the effect of the expression of a gene on the expression of other genes in the same cell or in different cells. This provides, for example, for a selection of alternate molecular targets for therapeutic intervention if the ultimate or downstream target cannot be regulated.

[1144] The array is also useful for ascertaining differential expression patterns of one or more genes in normal and abnormal cells. This provides a battery of genes that could serve as a molecular target for diagnosis or therapeutic intervention.

[1145] This invention is further illustrated by the following examples which should not be construed as limiting. The contents of all references, patents and published patent applications cited throughout this application, as well as the Figures and the Sequence Listing are incorporated herein by reference.

### EXAMPLES

### Example 1

### Isolation of a Full-Length cDNA Encoding Human Delta3

[1146] Human microvascular endothelial cells (HMVEC catalog #CC2543; Clonetics, San Diego, Calif.) were separated into four samples of cells which were treated as follows. The first sample was untreated. The second sample was treated with human TGF-β1 (hTGF-β1) (10 ng/ml) (Upstate Biotechnology, Lake Placid, N.Y., Catalog NO: 01-134). The third sample was treated with bFGF (10 ng/ml)/VEGF (25 ng/ml) (Upstate Biotechnology, Lake Placid, N.Y., Catalog NO: 01-134, Catalog Nos. 01-106 and 01-185, respectively). The fourth sample was differentiated on Matrigel (Collaborative Biomedical Products, Becton Dickinson Labware, Bedford, Mass.). Cells were treated as indicated for 24 hours, the 4 samples were pooled, and RNA was extracted from the pooled cells using a QIAGEN RNeasy kit. The resulting cDNA library was subjected to high throughput random sequencing. This allowed identification of a cDNA fragment comprising the following 171 nucleotide long sequence:

(SEQ ID NO: 21)
GCCCAGGCNGACCCTGGTGTGGACTGTGAGCTGGAGCTCAGCGAGTGT
GACAGCAACCCCTGTCGCANTGGAGGCAGCTGTAAGGACCANGAGGAT
GGCTACCACTGCCTGTGTCCTCCGGGCTACTACGGCNTGCATCGTGAA
CACNGCACCTCTTAGCTGNGCCGACTC.

[1147] Comparison of the nucleotide sequence of this partial cDNA with the sequences in GenBank using the BLAST program (Altschul et al. (1990) J. Mol. Biol. 215:403) revealed that the nucleotide sequence encoded a protein fragment having a significant homology to Delta proteins. In fact, the amino acid sequence had significant homology with a chicken Delta1 protein (GenBank Accession NO: U26590), a Xenopus Delta1 protein (GenBank Accession NO: L42229), a rat Delta1 protein (GenBank Accession NO: U78889), a Xenopus Delta2 protein (GenBank Accession NO: U70843) as well as Notch proteins.

[1148] A full-length cDNA of about 3.2 kb was then isolated by screening a human microvascular endothelial cell (HMVEC) cDNA library using the partial cDNA (SEQ ID NO:21). This nucleic acid was deposited at the American Type Culture Collection (ATCC®) on Mar. 5, 1997, and has been assigned ATCC® Accession NO: 98348. The nucleotide sequence of the cDNA isolated is shown in SEQ ID NO:1.

[1149] A nucleic acid sequence comparison of SEQ ID NO:1 against EST sequence databases using the BLAST program (Altschul et al. (1990) J. Mol. Biol. 215:403) indicated that 5 ESTs have a homology to portions of SEQ ID NO:1. These are all located 3′ of the nucleotide sequence encoding the transmembrane domain, i.e., downstream of nucleotide 1996 of SEQ ID NO:1. Three of these ESTs (having accession Nos. T33770, T33811, and T07963) have a nucleotide sequence starting at about nucleotide 2044 of SEQ ID NO:1. However, the nucleotide sequence of the three EST is significantly different from the nucleotide sequence of hDelta3 in about the first 50 nucleotides 3′ of nucleotide 2044 of SEQ ID NO:1. Two ESTs (having Accession Nos. R32717 and T07962) are located further downstream of the three ESTs.

[1150] The nucleic acid having SEQ ID NO:1 encodes a protein of 685 amino acids having SEQ ID NO:2. A comparison of the amino acid sequence of SEQ ID NO:2 with sequences in GenBank using BLASTP (Altschul et al. (1990) J. Mol. Biol. 215:403) reveals that this protein has a certain homology to previously described Delta proteins. An alignment of the human Delta3 protein having SEQ ID NO:2 with the amino acid sequence of mouse Delta1 protein (Accession NO: X80903), rat Delta1 protein (Accession NO: U78889), chicken Delta1 protein (Accession NO: U26590), two Xenopus Delta1 proteins (Accession Nos. L42229 and U70843) and Drosophila Delta1 protein (Accession NO: AA142228) indicates that human Delta3 protein has the general structure of a Delta3 protein. In particular, human Delta3 protein has a signal peptide corresponding to about amino acid 1 to about amino acid 17 of SEQ ID NO:2, a DSL motif corresponding to the sequence from about amino acid 173 to about amino acid 217, a first EGF-like domain corresponding to the sequence from about amino acid 222 to about amino acid 250, a second EGF-like domain corresponding to the sequence from about amino acid 253 to about amino acid 281, a third EGF-like domain corresponding to the sequence from about amino acid 288 to about amino acid 321, a fourth EGF-like domain corresponding to the sequence from about amino acid 328 to about amino acid 359, a fifth EGF-like domain corresponding to the sequence from about amino acid 366 to about amino acid 399, a sixth EGF-like domain corresponding to the sequence from about amino acid 411 to about amino acid 437, a seventh EGF-like domain corresponding to the sequence from about amino acid 444 to about amino acid 475, an eight EGF-like domain corresponding to the sequence from about amino acid 484 to about amino acid 517, a transmembrane domain corresponding to the sequence from about amino acid 530 to about amino acid 553, and a cytoplasmic domain corresponding to the sequence from about amino acid 554 to about amino acid 685 of SEQ ID NO:2.

[1151] An amino acid and nucleotide sequence comparison between the members of the Delta1 and Delta3 protein family and human Delta3 on one hand and between the members of the Delta1 family reveals that the homology between the Delta3 family members is stronger than the homology between human Delta3 and any of the Delta1 family members. For example, although hDelta3 is only approximately 58% similar to the Drosophila Delta1 protein; approximately 70% similar to the mouse Delta1 protein; approximately 70% similar to the rat Delta1 protein; approximately 68% similar to the chick Delta1 protein; and approximately 68% similar to the Xenopus Delta1 proteins; the drosophila, mouse, rat, chick and Xenopus Delta1 proteins are very similar to each other (e.g., the mouse and rat Delta1 are about 96% similar to each other). Published PCT application WO97/01571 discloses a partial nucleotide and amino acid sequence of a protein having significant homology to Delta1 family members, indicating that it is likely to be a human Delta1 protein. The homology between the partial amino acid sequence of human Delta1 and the amino acid sequence of human Delta3 is indicated in Table I and shows that the proteins are encoded by different genes. All these amino acid and nucleotide sequence comparisons indicate that human Delta3 is an additional species of Delta proteins, sharing some sequence and structure homology with the Delta1 proteins.

[1152] In one embodiment of a nucleotide sequence of human Delta3, the nucleotide at position 455 is a guanine (G) (SEQ ID NO:1). In this embodiment, the amino acid at position 40 is glutamate (E) (SEQ ID NO:2). In another embodiment of a nucleotide sequence of human Delta3, the nucleotide at position 455 is a cytosine (C) (SEQ ID NO:27). In this embodiment, the amino acid at position 40 is glutamine (Q) (SEQ ID NO:28). In another embodiment of a nucleotide sequence of human Delta3, the nucleotide at position 455 is a thymidine (T) (SEQ ID NO:29). In this embodiment, the amino acid at position 40 is a stop codon (SEQ ID NO:30). In another embodiment of a nucleotide sequence of human Delta3, the nucleotide at position 455 is a adenine (A) (SEQ ID NO:31). In this embodiment, the amino acid at position 40 is lysine (K) (SEQ ID NO:32).

[1153] In one embodiment of a nucleotide sequence of human Delta3, the nucleotide at position 786 is an cytosine (C) (SEQ ID NO:1). In this embodiment, the amino acid at position 150 is a alanine (A) (SEQ ID NO:2). In an alternative embodiment, a species variant of human Delta3 has a nucleotide at position 786 which is a thymidine (T) (SEQ ID NO:33). In this embodiment, the amino acid at position 150 is valine (V) (SEQ ID NO:34), i.e., a conservative substitution.

[1154] In one embodiment of a nucleotide sequence of human Delta3, the nucleotide at position 594 is a cytosine (C) (SEQ ID NO:1). In this embodiment, the amino acid at position 86 is threonine (T) (SEQ ID NO:2). In an alternative embodiment, a species variant of human Delta3 has a nucleotide at position 594 which is a guanine (G) (SEQ ID NO:35). In this embodiment, the amino acid at position 86 is serine (S) (SEQ ID NO:36), i.e., a conservative substitution.

[1155] In one embodiment of a nucleotide sequence of human Delta3, wherein the nucleotide at position 883 is a thymidine (T) (SEQ ID NO:1). In this embodiment, the amino acid at position 182 is aspartate (D) (SEQ ID NO:2). In an alternative embodiment, a species variant of human Delta3 has a nucleotide at position 883 which is an adenine (A) (SEQ ID NO:37). In this embodiment, the amino acid at position 182 is glutamate (E) (SEQ ID NO:38), i.e., a conservative substitution.

### Example 2

### Isolation of a Full-Length cDNA Encoding Mouse Delta3

[1156] A mouse Delta3 cDNA was identified from mouse lung database library of expressed sequences using the human Delta3 cDNA (SEQ ID NO:1) as a query sequence. The most homologous sequence, SEQ ID NO:24 was identified as a 3.2 kb cDNA.

[1157] The nucleic acid having SEQ ID NO:24 encodes a protein of 686 amino acids having the amino acid sequence shown in SEQ ID NO:25. An alignment of the human and mouse Delta3 proteins having SEQ ID NO:2 and 25, respectively, indicates that human and mouse Delta3 proteins have significant similarity and identity (i.e., 88.2% similar and 86.6% identical) suggesting evolutionary conservation due to an essential biological function.

[1158] Mouse Delta3 protein has a signal peptide corresponding to about amino acid 1 to about amino acid 17 of SEQ ID NO:25, a DSL motif corresponding to the sequence from about amino acid 174 to about amino acid 218, a first EGF-like domain corresponding to the sequence from about amino acid 223 to about amino acid 251, a second EGF-like domain corresponding to the sequence from about amino acid 254 to about amino acid 282, a third EGF-like domain corresponding to the sequence from about amino acid 289 to about amino acid 322, a fourth EGF-like domain corresponding to the sequence from about amino acid 329 to about amino acid 360, a fifth EGF-like domain corresponding to the sequence from about amino acid 367 to about amino acid 400, a sixth EGF-like domain corresponding to the sequence from about amino acid 412 to about amino acid 438, a seventh EGF-like domain corresponding to the sequence from about amino acid 445 to about amino acid 476, an eight EGF-like domain corresponding to the sequence from about amino acid 485 to about amino acid 518, a transmembrane domain corresponding to the sequence from about amino acid 531 to about amino acid 554, and a cytoplasmic domain corresponding to the sequence from about amino acid 555 to about amino acid 686 of SEQ ID NO:25.

[1159] In one embodiment of a nucleotide sequence of mouse Delta3, the nucleotide at position 49 is cytosine (C) (SEQ ID NO:24). In this embodiment, the amino acid at position 4 is alanine (A) (SEQ ID NO:25). In an alternative embodiment, a species variant of mouse Delta3 has a nucleotide at position 49 which is thymidine (T) (SEQ ID NO:39). In this embodiment, the amino acid at position 4 is valine (V) (SEQ ID NO:40), i.e., a conservative substitution.

[1160] In one embodiment of a nucleotide sequence of mouse Delta3, the nucleotide at position 51 is thymidine (T) (SEQ ID NO:24). In this embodiment, the amino acid at position 5 is serine (S) (SEQ ID NO:25). In an alternative embodiment, a species variant of mouse Delta3 has a nucleotide at position 51 which is a adenine (A) (SEQ ID NO:41). In this embodiment, the amino acid at position 5 is threonine (T) (SEQ ID NO:42), i.e., a conservative substitution.

[1161] In one embodiment of a nucleotide sequence of mouse Delta3, the nucleotide at position 109 is guanine (G) (SEQ ID NO:24). In this embodiment, the amino acid at position 24 is arginine (R) (SEQ ID NO:25). In an alternative embodiment, a species variant of mouse Delta3 has a nucleotide at position 109 which is adenine (A) (SEQ ID NO:43). In this embodiment, the amino acid at position 24 is histidine (H) (SEQ ID NO:44), i.e., a conservative substitution.

[1162] In one embodiment of a nucleotide sequence of mouse Delta3, wherein the nucleotide at position 130 is a thymidine (T) (SEQ ID NO:24). In this embodiment, the amino acid at position 31 is phenylalanine (F) (SEQ ID NO:25). In an alternative embodiment, a species variant of mouse Delta3 has a nucleotide at position 130 which is adenine (A) (SEQ ID NO:45). In this embodiment, the amino acid at position 31 is tyrosine (Y) (SEQ ID NO:46), i.e., a conservative substitution.

### Example 3

### Tissue Expression of the hDelta3 Gene

[1163] This Example describes the tissue distribution of Delta3 protein, as determined by Northern blot hybridization with a 1.6 kb fragment of human Delta3 cDNA corresponding to the extreme 3′ end of SEQ ID NO:1 and by in situ hybridization using a probe complementary to nucleotides 1290-1998 of SEQ ID NO:1.

[1164] Northern blot hybridizations with the various RNA samples were performed under standard conditions and washed under stringent conditions, i.e., in 0.2×SSC at 65° C. In each sample, the probe hybridized to a single RNA of about 3.5 kb. The results of hybridization of the probe to various mRNA samples are described below.

[1165] Hybridization of a Clontech Fetal Multiple Tissue Northern (MTN) blot (Clontech, LaJolla, Calif.) containing RNA from fetal brain, lung, liver, and kidney indicated the presence of Delta3 RNA in each of these fetal tissues. Expression was significantly higher in fetal lung and kidney than in fetal brain and liver. Hybridization of a Clontech human Multiple Tissue Northern I (MTNI) and Multiple Tissue Northern H (MTNII) blots (Clontech, LaJolla, Calif.) containing RNA from adult heart, brain, placenta, lung, liver, skeletal muscle, kidney, pancreas, spleen, thymus, prostate, testis, ovary, small intestine, mucosal lining of the colon, and peripheral blood leukocytes with the human 1.6 kb Delta3 probe indicated expression in heart, placenta, lung, skeletal muscle, kidney, pancreas, spleen, thymus, prostate, testis, ovary, small intestine and colon. Expression was particularly strong in adult heart, placenta, lung, and skeletal muscle. Expression was also found in adult brain, liver and testis. However, no significant amount of hDelta3 mRNA was detected in adult peripheral blood leukocytes.

[1166] Further, Northern blot hybridization of total mRNA from HMVEC cells treated with TGF-β1 at 10 ng/ml for 24 hours, bFGF at 10 ng/ml/VEGF at 25 ng/ml for 24 hours, or untreated for 24 hours indicated that Delta3 expression was induced upon induction with bFGF/VEGF. Accordingly, expression of Delta3 is up-regulated in HMV endothelial cells in response to certain growth factors.

[1167] Hybridization of a “cancer” Northern blot containing RNA from HL-60, HeLa, K562, MoLT4, Raji, SW480, A549, and G361 cells, revealed that Delta3 is expressed at high levels in the colorectal carcinoma cell line SW480. Thus, Delta3 expression is high in at least certain tumor cells.

[1168] Delta-3 in situs on paraffin embedded mouse embryos were performed. Expression was seen in endothelial cells of the secondary vasculature and in preendothelial cells in the bone marrow. There is no expression in endothelial cells after day P 1.5.

[1169] For in situ hybridization analysis of mDelta3, 10 m sagittal sections of fresh frozen day E13.5, E14.5, E15.5, E16.5, E18.5 and P1.5 embryos of B6 mice, as well as 8 m cross sections of brain, spinal cord, eye and harderian gland, submandibular gland, white fat, stomach, heart, lung, liver, spleen, thymus, small intestine, lymph node, pancreas, skeletal muscle, testes, ovary, placenta, kidney and adrenal gland from adult B6 mice were used for hybridization. Sections were postfixed with 4% formaldehyde in DEPC-treated 1× phosphate-buffered saline at room temperature for 10 minutes before being rinsed twice in DEPC-treated 1× phosphate-buffered saline and once in 0.1 M triethanolamine-HCl (pH8.0). Following incubation in 0.25% acetic anhydride-0.1 M triethanolamine-HCl for 10 minutes, sections were rinsed in DEPC-treated 2×SSC (1×SSC is 0.15M NaCl plus 0.015M sodium citrate). Tissue was dehydrated through a series of ethanol washes, incubated in 100% chloroform for 5 minutes, and then rinsed in 100% ethanol for 1 minute and 95% ethanol for 1 minute and allowed to air dry.

[1170] The hybridization was performed using a ³⁵S-radiolabeled cRNA probe from the DNA sequence of nucleotides 1290-1998 of SEQ ID NO:1.

[1171] Tissues were incubated with probe (approximately 5×10⁷ cpm/ml) in the presence of a solution containing 600 mM NaCl, 10 mM Tris (pH 7.5), 1 mM EDTA, 0.01% sheared salmon sperm DNA, 0.01% yeast tRNA, 0.05% yeast total RNA type X1, 1×Denhardt's solution, 50% formamide, 10% dextran sulfate, 100 mM dithiothreitol, 0.1% sodium dodecylsulfate (SDS), and 0.1% sodium thiosulfate for 18 h at 55 C.

[1172] After hybridization, slides were washed with 2×SSC. Sections were then sequentially incubated at 37 C in TNE (a solution containing 10 mM Tris-HCl (pH 7.6), 500 mM NaCl, and 1 mM EDTA), for 10 minutes, in TNE with 10 ug of RNase A per ml for 30 minutes, and finally in TNE for minutes. Slides were then rinsed with 2×SSC at room temp, washed with 2×SSC at 50° C. for 1 hour, washed with 0.2×SSC at 55° C. for 1 hour, and 0.2×SSC at 60° C. for 1 hour. Sections were then dehydrated rapidly through serial ethanol-0.3 M sodium acetate concentrations before being air dried and exposed to Kodak Biomax MR scientific imaging film for 6 days at room temperature.

[1173] Expression was most abundant and wide spread during embryogenesis. Strongest expression was observed in the eye in all of the embryonic ages tested. Signal in a pattern suggestive of neuronal expression was not observed in any other tissues making the expression in the eye unique. Moderate ubiquitous expression was also detected in lung, thymus and brown fat during embryogenesis. A multifocal, scattered signal was also observed throughout the embryo. This signal pattern was more focused in the cortical region of the kidney and outlining the intestinal tract. Adult expression was highest in the ovary and the cortical regions of the kidney and adrenal gland.

[1174] Thus, Delta3 is expressed in numerous tissues, but is not detected in certain tissues, e.g., peripheral blood leukocytes and adult heart tissue (at least when using Northern blot hybridization), is expressed at relatively high levels in at least some tumor cells, e.g., colon carcinoma cells, and its expression can be up-regulated in response to some growth factors, e.g., bFGF and VEGF. Furthermore, in situ hybridization shows that mDelta3 is expressed most strongly in developing tissues of eye, thymus, lung and brown fat.

[1175] A Southern blot containing DNA from a panel of a human/hamster mono-chromosomal somatic cell hybrids was probed with an hDelta1 cDNA probe. The results obtained clearly indicates that the human Delta3 gene resides on chromosome 15.

### Example 4

### Increased Expression of hDelta3 in Differentiating Endothelial Cells

[1176] This Example shows that the expression of the hDelta3 gene increases in differentiating endothelial cells relative to non-differentiating endothelial cells.

[1177] HMVEC cells were separated into 5 cultures and treated as follows: (1) cells were induced to quiescence by growth in basal endothelial growth medium (EGM) (Clontech) which contains 10% fetal calf serum (FCS); (2) cells were grown in complete endothelial growth medium (EGM-MV) (Clontech, Catalog NO: CC-3125) which contains 10% FCS and growth factors; (3) cells were stimulated to proliferate by culture in EGM-MV in the presence of bFGF at 10 ng/ml and VEGF at 25 ng/ml; (4) cells were stimulated to proliferate by culture in EGM-MV in the presence of TGF-131 at 10 ng/ml; and (5) cells were stimulated to differentiate by culture in EGM-MV on Matrigel. After 24 hours of culture, the cells were harvested, the RNA was extracted and submitted to Northern blot analysis. Hybridization was performed with the 1.6 kb hDelta3 probe described above. The results indicate that among the culture conditions tested, quiescent cells express the lowest amount of hDelta3 (at a barely detectable level). Cells which are proliferating express a higher level of hDelta3. Interestingly, the mRNA level of hDelta3 was strongly increased in cells induced to differentiate by plating on Matrigel.

[1178] Thus, this Example clearly demonstrates that hDelta3 expression is strongly increased in cells induced to differentiate and also in cells induced to proliferate.

### Example 5

### hDelta3 is Located in a Chromosomal Region Associated with ACCPN

[1179] The location of hDelta3 on human chromosome 15 was determined using radiation hybrid (RH) mapping.

[1180] A sequence tagged site (STS) was generated from the 3′ untranslated region of the gene using a forward primer having the nucleotide sequence GTTTACATTGCATCCTGGAT (SEQ ID NO:51) and a reverse primer having the nucleotide sequence CTCTTCTGTTCCTCTGGTTG (SEQ ID NO:22). The STS was used to screen the Genebridge 4 (Gyapay et al. (1996) Human Molecular Genetics 5:339) and the Standford G3 (Stewart et al. (1997) Genome Res. 7:422) radiation hybrid panels. These panels were derived by fusion of irradiated human donor cells with rodent recipient cells and can be used for positioning STS markers within existing framework maps, ordering markers in the region of interest as well as establishing the distance between markers.

[1181] RH mapping was performed by PCR under the following conditions: 25 ng DNA/20 μl reaction, 0.5 of each primer, 0.2 mM of each nucleotide, 1.5 mM MgCl₂, 1× buffer as provided by the manufacturer of the enzyme, 35 cycles at 94° C., 55° C., 72° C. for 30 seconds each.

[1182] The results of the RH mapping indicated that hDelta3 maps to 15q12-15 close to framework marker D15S1244 on the Stanford G3 panel and close to framework marker D15S144 on the Genebridge 4 panel with a LOD score >3. Searching of the OMIM database (Online Mendelian Inheritance in Man) indicated that this region has previously been genetically linked to a neurological disorder called Agenesis of the Corpus Callosum with Peripheral Neuropathy (ACCPN) (Casaubon et al. (1996) Am. J. Hum. Genet. 58:28).

### Example 6

### Delta3 Encodes a Notch Ligand

[1183] The example presented herein demonstrates that Delta3 encodes a Notch Ligand. In particular, the data presented herein shows, first, that hDelta3 encodes a functional Notch ligand as determined by its ability to block differentiation of C2C12 cells. When C2C12 cells are co-cultured, under low mitogenic conditions, with NIH3T3 cells expressing a Notch ligand, the differentiation to myotubes by the C2C12 cells is blocked. (Lindsell et al. (1995) Cell 80:909). If the cells differentiate troponin T is expressed, if differentiation is blocked no troponin T expression is seen. In addition, the data presented herein directly demonstrates that Delta3 binds Notch one and Notch 2. Third, the data presented in this section identifies several cell types that endogenously exhibit Delta3 receptors.

[1184] To determine whether hDelta3 in fact encodes a functional Notch ligand, NIH3T3 cells were engineered to express hDelta3, co-cultured with C2C12 cells and analyzed for troponin T expression. Briefly, NIH3T3 cells were infected with a retrovirus containing the hDelta3 coding region cloned into the MIGR retroviral vector (Pear et al. (1998) Blood 92:3780). This vector contains an Internal Ribosome Entry Site (IRES) downstream of the cloning site, followed by the cDNA for the green fluorescent protein (GFP). GFP expression from the vector is monitored to assess the efficiency of transduction of the vector into the target cells. C2C12 cells were plated in 10 cm dishes and cultured in DMEM media with 10%

[1185] Inactivated Fetal Calf Serum (10% IFS) until 70% confluent. C2C12 cells were then washed 1× with PBS. 5×10⁶ NIH3T3 cells harboring either an empty vector, a vector expressing hDelta3 or a vector expressing Jagged-1 were resuspended in 10 mls DMEM media containing 10% Horse serum (10% HS), and laid on top of the C2C12 cells.

[1186] Control experiments involved the solitary culture of C2C12 cells in differentiation media (10% HS) as well as in growth media (10% IFS). The whole population of cells was lysed three to four days later and equal amounts of protein was resolved on an SDS-polyacrylamide gel. The proteins were then transferred onto a nitrocellulose membrane and probed with an anti-Troponin T antibody (Sigma, 1:200). A secondary incubation with an anti-mouse antibody conjugated to horseradish peroxidase allowed for detection using chemiluminescence reagents (Amersham). When cells NIH3T3 cells containing the empty vector were co-cultured with C2C12 cells, troponin T was expressed, indicating that the C2C12 cells had indeed differentiated into myotubes. When NIH3T3 cells expressing hDelta3 were co-cultured with C2C12 cells, no expression of troponin T was seen, indicating that C2C12 differentiation was blocked by hDelta3. This result is similar to that seen when NIH3T3 cells expressing Jagged 1 (a functional Notch ligand).

[1187] Next, Delta3 was tested for its ability to bind human notch1 and notch2. 293T cells were transiently transfected with expression plasmids (PCMV poly-neo) encoding full-length Notch1 or Notch2. Two days after transfection cells were incubated with purified protein consisting of the extracellular domain of hDelta3 fused in frame to the Fc portion of immunoglobulin G (hDelta3-Fc) at 10 μg/ml or with control protein consisting of human immunoglobulin G1 (hIgG1) at 10 ug/ml in staining buffer (PBS containing 3% fetal calf serum, 1 mM CaCl₂ and 0.02% sodium azide). After one hour of incubation, cells were washed three times in staining buffer and bound protein was detected by incubating the cells with FITC-conjugated anti-human IgG for 30 minutes. Cells were analyzed under fluorescence microscopy.

[1188] Binding of hDelta3-Fc fusions to cells expressing Notch1 and Notch2 but not to cells transfected with empty expression vector, was detected. Binding was calcium-dependent and was abolished in the presence of 5 mM EDTA. Control-Fc fusions and hIgG1 did not show any binding to transfected cells. These results establish hDelta3 as a ligand for Notch1 and Notch2 and show that the extracellular domain of hDelta3 is sufficient to mediate binding to Notch.

[1189] Therefore, Delta3, including hDelta3, represents a polypeptide which can function as a bona fide Notch ligand.

[1190] Next, Cell lines were tested for the presence of an endogenous receptor for hDelta3. Briefly, cells were washed two times in staining buffer and incubated with hDelta3-Fc or hIgG1 (10 μg/ml in staining buffer) at a cell concentration of 5×10⁶ per ml. After an incubation of one hour on ice, cells were washed three times in staining buffer and bound protein was detected by incubating the cells with FITC-conjugated secondary antibody (anti-human hIgG1) for 30 min on ice. Cells were analyzed by flow cytometry on a FACSCalibur. Binding of hDelta3-Fc was seen to Jurkat, 32D, C2C12 and Cos cells. A control Fc fusion protein and hIgG1 did not show binding to these cell lines. The binding of hDelta3-Fc was dependent on calcium since the binding was abolished by the addition of 5 mM EDTA to the binding buffer.

### Example 7

### Delta3 Affects Early Development and Muscle Cell Differentiation

[1191] The data presented herein demonstrate that among the roles of Delta3 is a function that involves early development and muscle cell differentiation.

### Materials and Methods

[1192] Preparation of hDelta3 RNA: The template for the hDelta3 in vitro transcription reaction was prepared from the DNA construct containing the hDelta3 sequence inserted in a pCS2++ vector, which was then linearized using AscI. Capped RNA was synthesized using SP6 RNA polymerase from the linearized plasmid using mMESSAGE mMACHINE kit (Ambion, Austin, Tex.) according to the manufacturer's instructions. In vitro transcribed capped RNA was purified using RNAesy kit (Qiagen) and analyzed by gel electrophoresis.

[1193] HDelta3 RNA injection into Xenopus embryos: Xenopus embryos were obtained by in vitro fertilization, dejellied in 2% cysteine HCl (pH 7.6), washed thoroughly in Modified Ringer's solution, and incubated at 15-25° C. Embryos were transferred to injection solution (Modified Ringer's solution containing 3% Ficoll) prior to injections. One ng and 2.5 ng of hDelta3 RNA were injected into one blastomere at the 2-cell stage. Embryos were transferred to 0.1×MMR from the injection solution after approximately 6 hours and grown until the appropriate stage.

[1194] Embryos for histological examination were fixed in 4% formaldehyde in PBS overnight, embedded in paraffin and stained with Heidenhain's Azan stain by standard procedures. Transverse sections of injected embryos show disruption of somitic organization and somite boundaries on the injected side.

[1195] Xenopus animal cap assay: 2 ng of hDelta3 RNA was injected into the animal pole of each of the 2 Xenopus blastomeres at the 2-cell stage. Animal caps from uninjected or injected embryos were explanted at stage 9 and cultured in 1XModified Ringers containing 0.01% BSA and 50 ug/ml gentamycin. Animal caps were cultured until control embryos have reached stage 23-24. Animal cap tissue was lysed and total RNA was extracted using RNeasy kit (Qiagen). RT-PCRs were performed on these samples using gene-specific primers and appropriate annealing temperatures and the products analyzed by gel electrophoresis. The primers used in this experiment were specific to genes EF1-alpha, XCG-1, NCAM, Xbra, M-actin, Sox-17 (Amaravadi et al. (1997). Dev. Biol. 192:392-404). RT-PCR analysis did not indicate expression of any of the specific marker genes tested.

### Results:

[1196] Examination of embryos injected with hDelta3 RNA two days post-injection showed an overexpression phenotype involving axial disruption indicative of an effect on somites and anterior dorsal structures such as eyes and cement glands were not well differentiated in half of the injected embryos. These results suggest that hDelta3 has an effect on early tissue development/differentiation.

[1197] The differential stain used in this study also indicated an enlargement of somite size on the injected side demonstrating that hDelta3 has an effect on muscle cells and overexpression can lead to enlarged muscle mass. Notch/Delta signaling has been shown to play a key role in somitogenesis/myogenesis in various species (Wittenberger et al., (1999) EMBO J. 18:915-922); Dornseifer et al. (1997) Mech. Dev. 63:159-171); Kusumi et al. (1998) Nat. Genet. 19:274-278).

[1198] Therefore, the results presented herein indicate that Delta3 can be involved in early development (e.g., can have a role downstream of germ layer specification function), and can be involved in modulating myogenesis and muscle cell differentiation.

### Example 8

### Identification of Delta Therapeutics

[1199] This Example describes a simple assay for isolating Delta therapeutics, (e.g., agonist or antagonist of a Delta activity), e.g., Delta3 therapeutics. Based at least in part on the results described in the previous Examples, Delta therapeutics can be used for treating various diseases, including neurological diseases, and/or hyper- or hypoproliferative diseases, hematologic disorders, immunodeficiency states and diseases or conditions associated with defects in vasculature and/or conditions requiring neovascularization and/or conditions hallmarked by aberrant neovascularization, e.g., diabetic retinopathy. In addition, based at least in part on the similarity of amino acid sequence and structure between the various Delta proteins, Delta3 therapeutics can be used to treat diseases or conditions associated with an aberrant Delta3 activity or an aberrant Delta activity other than a Delta3 activity. Similarly, Delta3 therapeutics as well as Delta therapeutics other than Delta3 therapeutics can be used to treat diseases or conditions associated with an aberrant Delta3 activity. The assay set forth below is applicable to Delta proteins other than Delta3 proteins.

[1200] A Delta3 therapeutic can be identified by using an in vitro assay, in which the interaction between a Delta3 protein and a Delta3 binding protein, e.g., a Notch protein, is determined in the presence and in the absence of a test compound. A soluble binding fragment of a Delta3 protein can be prepared by expression of the extracellular portion of human Delta3, e.g., about amino acids 1-529 of SEQ ID NO:2 or about amino acids 1-530 of SEQ ID NO:25, in E. coli according to methods known in the art. Alternatively, the Delta3 protein fragment can be about amino acid 173 to about amino acid 517 of SEQ ID NO:2 or from about amino acid 174 to about amino acid 508 of SEQ ID NO:25. Similarly, a Delta3 binding fragment of a Delta3 binding protein (i.e., Delta3 binding partner) can be produced recombinantly.

[1201] A Delta3 binding protein can be a Notch protein and can be identified, e.g., by determining whether the protein is capable of binding to a Delta3 protein. A nucleic acid encoding a Notch protein can be obtained, e.g., by PCR amplifying a portion of a Notch gene encoding at least an EGF-like domain, using primers having a nucleotide sequence derived from the nucleotide sequence of a Notch gene present in GenBank or disclosed in PCT Application NO: PCT/US92/03651 or PCT/US93/09338.

[1202] Test compounds can then be tested to determine whether they inhibit the interaction between the Delta3 and the Delta3 binding protein by using an ELISA type assay. Accordingly, one of the recombinantly produced Delta3 protein and the Delta3 binding protein, e.g., Notch protein, is attached to a solid phase surface and the other protein is labeled, e.g., such as by tagging the protein with an epitope, for which an antibody is available (e.g., FLAG epitope, available from International Biotechnologies, Inc.). As a non-limiting example of an assay, the Delta3 protein can be linked to the wells of a microtiter (96 well) plate by overnight incubation of the protein at a concentration of 10 μg/ml in PBS. After blocking unoccupied sites on the plate with a BSA solution, various amounts of test compounds and the recombinantly produced Delta3 binding protein are added to the wells in a buffer suitable for a specific interaction between the proteins.

[1203] After an incubation time of several hours, the wells are rinsed with buffer, and the amount of Delta3 binding protein attached to the wells is determined. The amount of bound protein can be determined by incubating the wells with an anti-tag, e.g., anti-myc, antibody, which can then be detected by enzyme immunoassay. The amount of bound protein is then determined by determining the optical density using an ELISA reader. A lower amount of Delta3 binding protein in a well that contained a test compound relative to a well that did not contain a test compound is indicative that the test compound inhibits the interaction between Delta3 and a Delta3 binding protein.

[1204] In a further non-limiting example of a binding assay, a recombinantly produced and labeled Delta3 polypeptide, or fragment thereof capable of binding a Delta3 binding protein, is incubated, with or without a test compound, with cells expressing the Delta3 binding protein (Shimizu et al. (1999) J. Biol. Chem. 274:32961-32969). Alternatively, the recombinant Delta3 polypeptide is not labeled and is detected upon binding the cell by a second Delta3 binding protein, such as an antibody. A lower amount of Delta3 binding protein in a well that contained a test compound relative to a well that did not contain a test compound is indicative that the test compound inhibits the interaction between Delta3 and a Delta3 binding protein.

[1205] A Delta3 therapeutic can also be identified by using a reporter assay in which the level of expression of a reporter construct under the control of a Delta3 promoter is measured in the presence or absence of a test compound. A Delta3 promoter can be isolated by screening a genomic library with a Delta3 cDNA which preferably contains the 5′ end of the cDNA. A portion of the Delta3 promoter, typically from about 50 to about 500 base pairs long is then cloned upstream of a reporter gene, e.g., a luciferase gene, in a plasmid. This reporter construct is then transfected into cells, e.g., neural cells or endothelial cells. Transfected cells are then be distributed into wells of a multiwell plate and various concentrations of test compounds are added to the wells. After several hours incubation, the level of expression of the reporter construct is determined according to methods known in the art. A difference in the level of expression of the reporter construct in transfected cells incubated with the test compound relative to transfected cells incubated without the test compound will indicate that the test compound is capable of modulating the expression of the Delta3 gene and is thus a Delta3 therapeutic.

### Example 9

### Isolation and Characterization of Human FTHMA-070 cDNAs

[1206] The nucleic acid molecule encoding FTHMA-070 was identified during the sequencing of clones present in a cardiac coronary artery smooth muscle cell library. A clone was identified which appeared to have some homology to TNF receptor. This clone proved to encode FTHMA-070. The nucleic acid sequence and deduced amino acid sequence of FTHMA-070, which has homology to tumor necrosis factor receptor (including the death domain) are shown in SEQ ID NO:53 and SEQ ID NO:54, respectively.

### Example 10

### Characterization of FTHMA-070 Proteins

[1207] The human FTHMA-070 cDNA isolated as described above (SEQ ID NO:53) encodes a 401 amino acid protein (SEQ ID NO:54). FTHMA-070 is predicted to include a 21 amino acid signal peptide (amino acid 1 to about amino acid 21 of SEQ ID NO:54) preceding the 380 mature protein (about amino acid 22 to amino acid 401; SEQ ID NO:56).

### Example 11

### Preparation of FTHMA-070 Proteins

[1208] Recombinant FTHMA-070 can be produced in a variety of expression systems. For example, the mature FTHMA-070 peptide can be expressed as a recombinant glutathione-S-transferase (GST) fusion protein in E. coli and the fusion protein can be isolated and characterized. Specifically, as described above, FTHMA-070 can be fused to GST and this fusion protein can be expressed in E. coli strain PEB199. Expression of the GST-FTHMA-070 fusion protein in PEB 199 can be induced with IPTG. The recombinant fusion protein can be purified from crude bacterial lysates of the induced PEB 199 strain by affinity chromatography on glutathione beads.

### Example 12

### Isolation and Characterization of Human FTHMA-070 cDNAs

[1209] The nucleic acid molecule encoding T85 (originally called FMHB-6D4 and FMHB-SD4) was identified using a screen designed to identify genes encoding proteins having a functional signal sequence. Briefly, a library was prepared in which each of the clones contained a human fetal brain cDNA ligated to a sequence encoding a detectable protein which lacked a signal sequence. If the human fetal cDNA encodes a functional signal sequence, it will permit the secretion and detection of the detecable protein. This clone library was used to transfect mammalian cells. Clones which secreted the detectable protein were then identified and the corresponding human fetal brain cDNA was isolated and sequenced using standard techniques. In this way it was possible to identify a clone encoding T85. The nucleic acid sequence and deduced amino acid sequence of T85 are shown in SEQ ID NO:57 and SEQ ID NO:58, respectively.

### Example 13

### Characterization of T85 Proteins

[1210] The human T85 cDNA isolated as described above (SEQ ID NO:57) encodes a 753 amino acid protein (SEQ ID NO:58). The signal peptide prediction program SIGNALP (Nielsen et al. (1997) Protein Engineering 10:1-6) predicted that T85 includes a 20 amino acid signal peptide (amino acid 1 to about amino acid 20 of SEQ ID NO:58) preceding the 733 amino acid mature protein (about amino acid 21 to amino acid 753 of SEQ ID NO:58; SEQ ID NO:60). For general information regarding PFAM identifiers and Hidden Markov Model (HMM) consensus sequences refer to Sonnhammer et al. (1997) Protein 28:405-420.

[1211] T85 has a two regions (amino acids 525-610 and 638-727 of SEQ ID NO:58; SEQ ID NO:61 and SEQ ID NO:62, respectively) of homology to a fibronectin type III domain (based on HMM PF00041; SEQ ID NO:70). Also, T85 has a five regions (amino acids 43-101; 145-203; 237-298; 329-394; and 433-491 of SEQ ID NO:58; SEQ ID NOs:63-67) of homology to a Ig superfamily domain. T85 also includes an RGD motif starting at amino acid 247 of SEQ ID NO:58; a cytokine receptor homolgy N-terminal (BC) domain (CC-CC) at amino acids 516-600 of SEQ ID NO:58.

### Example 14

### Preparation of T85 Proteins

[1212] Recombinant T85 can be produced in a variety of expression systems. For example, the mature T85 peptide can be expressed as a recombinant glutathione-S-transferase (GST) fusion protein in E. coli and the fusion protein can be isolated and characterized. Specifically, as described above, FTHMA-070 can be fused to GST and this fusion protein can be expressed in E. coli strain PEB 199. Expression of the GST-T85 fusion protein in PEB 199 can be induced with IPTG. The recombinant fusion protein can be purified from crude bacterial lysates of the induced PEB 199 strain by affinity chromatography on glutathione beads.

### Example 15

[1213] As shown in FIGS. 2A-D, T85 exhibits considerable homology to human Robo protein (Kidd et al. (1997) Cell 92:205-215), an axon guidance receptor that is thought to play and important role in neuronal development, specifically, control of midline crossing. Accordingly, T85 may also play a role in neuronal development. Thus, T85 nucleic acids, polypeptides, T85 agonists, and T85 antagonists may be useful in the treatment of neurological disorders.

### Example 16

### Isolation and Characterization of Human Tango-77 cDNAs

[1214] Cytokine genes IL-1α, IL-1β and IL-1ra have been found to be closely clustered on chromosome 2, i.e., IL-1α, IL-1β and IL-1ra are located within 450 kb of each other. BAC clones containing IL-1α and IL-1β were used to identify other proximal unknown cytokine genes. To do this, a BAC clone containing IL-1α and IL-1β was selected from a BAC library (Research Genetics, Huntsville, Ala.) using specific primers designed against IL-1α and IL-1β. The DNA from the BAC was extracted and used to make a random-sheared genomic library. From this BAC library, 4000 clones were selected for sequencing. The resulting genomic sequences were then assembled into contigs and used to screen proprietary and public data bases. One genomic contig was found to contain two segments of sequences which resemble IL-1ra. These two segments are potential exons of Tango-77 gene.

[1215] Two PCR primers were then designed from the two potential exons and used to screen a panel of cDNA libraries for the expression of a Tango-77 message. A cDNA library from TNF-α treated human lung epithelia showed a positive band of the predicted size (i.e., if the two exons are spliced together). Using the PCR fragment as a probe, a single cDNA clone was isolated from the same library. This cDNA contains an insert of 989 bp. The cDNA clone contains three possible open reading frames. The first open reading frame encompasses 534 nucleotides (nucleotides 356-889 of SEQ ID NO:71; SEQ ID NO:73) and encodes a 178 amino acid protein (SEQ ID NO:72). This protein may include a predicted signal sequence of about 63 amino acids (from amino acid 1 to about amino acid 63 of SEQ ID NO:72 (SEQ ID NO:74)) and a predicted mature protein of about 115 amino acids (from about amino acid 64 to amino acid 178 of SEQ ID NO:72 (SEQ ID NO:75)).

[1216] The second putative nucleotide open reading frame encompasses 498 nucleotides (nucleotides 389-889 of SEQ ID NO:71; SEQ ID NO:76) and encodes a 167 amino acid protein (SEQ ID NO:77). This protein includes a predicted signal sequence of about 52 amino acids (from amino acid 1 to about amino acid 52 of SEQ ID NO:77 (SEQ ID NO:78)) and a predicted mature protein of about 115 amino acids (from about amino acid 53 to amino acid 167 of SEQ ID NO:77 (SEQ ID NO:79)).

[1217] The third open reading frame (nucleotides 372-889 of SEQ ID NO:71; SEQ ID NO:80) encompasses 408 nucleotides and encodes a 136 amino acid protein (SEQ ID NO:81). This protein includes a predicted signal sequence of about 21 amino acids (from amino acid 1 to about amino acid 21 of SEQ ID NO:81 (SEQ ID NO:82)) and a predicted mature protein of about 115 amino acids (from about amino acid 22 to amino acid 136 of SEQ ID NO:81 (SEQ ID NO:83)).

[1218] Tango-77 is predicted to be 35% identical to human IL-1ra at the amino acid level.

### Example 17

### Expression of Tango-77 mRNA in Human Tissues

[1219] The expression of Tango-77 was analyzed using Northern blot hybridization. A PCR generated 989 bp Tango-77 product was radioactively labeled with ³²P-dCTP using the Prime-It kit (Stratagene; La Jolla, Calif.) according to the instructions of the supplier. Filters containing human mRNA (MTNI and MTNII: Clontech; Palo Alto, Calif.) were probed in ExpressHyb hybridization solution (Clontech) and washed at high stringency according to manufacturer's recommendations.

[1220] Tango-77 mRNA was not detected in any unstimulated tissues (brain, liver, spleen, skeletal muscle, testis, pancreas, heart, kidney and peripheral blood leukocytes) mRNA on Clontech Northern blots.

[1221] Over 96 cDNA libraries were then tested for the presence of Tango-77 using PCR amplification. Only three libraries displayed a positive signal. These libraries were the TNFα-treated bronchoepithelium, TNFα-treated SSC cell line and anti-CD3-treated T cells.

### Example 18

### Characterization of Tango-77 Proteins

[1222] In this example, the predicted amino acid sequence of human Tango-77 protein was compared to the amino acid sequence of known protein IL-1ra. In addition, the molecular weight of the human Tango-77 proteins was predicted.

[1223] The human Tango-77 cDNA (SEQ ID NO:71) isolated as described above encodes a 178 amino acid protein (SEQ ID NO:72) or a 167 amino acid protein (SEQ ID NO:77) or a 136 amino acid protein (SEQ ID NO:81). The signal peptide prediction program SIGNALP Optimized Tool (Nielsen et al. (1997) Protein Engineering 10:1-6) predicted that Tango-77 includes a 63 amino acid signal peptide (amino acid 1 to about amino acid 63 of SEQ ID NO:72 (SEQ ID NO:74)) preceding the 115 mature protein; or preceding the 115 mature protein (about amino acid 52 to amino acid 167 of SEQ ID NO:77 (SEQ ID NO:78)); or preceding the 115 mature protein (about amino acid 21 to amino acid 136 of SEQ ID NO:81; SEQ ID NO:82).

[1224] As shown in FIG. 3, Tango-77 has a region of homology to IL-1ra (SEQ ID NO:84).

[1225] Mature Tango-77 has a predicted MW of about 13 kDa and the predicted MW for the immature Tango-77 is 19.6 kDa, 18.5 kDa or 15.2 kDa, not including post-translational modifications.

### Example 19

### Preparation of Tango-77 Proteins

[1226] Recombinant Tango-77 can be produced in a variety of expression systems. For example, the mature Tango-77 peptide can be expressed as a recombinant glutathione-S-transferase (GST) fusion protein in E. coli and the fusion protein can be isolated and characterized. Specifically, as described above, Tango-77 can be fused to GST and this fusion protein can be expressed in E. coli strain PEB 199. Expression of the GST-Tango-77 fusion protein in PEB 199 can be induced with IPTG. The recombinant fusion protein can be purified from crude bacterial lysates of the induced PEB199 strain by affinity chromatography on glutathione beads.

### Example 20

### Alternatively Spliced Forms of IL-1ra and Tango-77

[1227] Computer program Procrustes (Gelfand et al., 1996, Proc. Natl. Acad. Sci. USA, 93:9061-9066) is an alignment algorithm that predicts the presence of alternatively spliced exons for a protein of interest in a stretch of genomic DNA. Using the IL-1ra sequence, Proscustes was used to search for the presence of additional sequences that might encode for alternatively spliced forms of IL-1ra in the two overlapping BAC genomic sequences. Potential sequences that encode variant exons for IL-1ra were identified. These predicted exons aligned well with the N-terminal region of IL-1ra, but were not present in Tango-77. The results from Procrustes predicts the existence of more spliced forms of IL-1ra.

[1228] Furthermore, Procrustes also predicted an additional sequence in BAC1 (SEQ ID NO:86) and BAC2 (SEQ ID NO:87) that encodes an alternatively spliced exon for Tango-77 (T77-procrustes). This predicted splice variant form of Tango-77, T77-procrustes, was aligned with Tango-77 and with IL-1ra and IL-1β.

[1229] PCR primers within this sequence can be used to generate a product that can be used to screen a panel of cDNA libraries using standard techniques. Suitable cDNA libraries include libraries made from TNFα-treated bronchoepithelium, TNFα-treated SSC cell line and anti-CD3-treated T cells. The resulting cDNA clone(s) can be isolated from the library and sequenced to identify additional Tango-77 cDNAs.

### Example 21

### Isolation and Characterization of Human and Murine SPOIL cDNAs

[1230] In this example, the isolation of the genes encoding human and murine SPOIL proteins (also referred to as “TANGO 080” proteins) are described.

Isolation of Murine SPOIL-I and SPOIL-II cDNAs

[1231] A murine SPOIL-I cDNA was identified by searching with a murine cDNA encoding an IL-1 signature region (Prosite™ Accession Number PDOC00226) against a copy of the GenBank nucleotide database using the BLASTN™ program (BLASTN 1.3 MP: Altschul et al., J. Mol. Bio. 215:403, 1990). A clone with 48% homology with the murine cDNA IL-1 signature region was found by this search. The sequence was analyzed against a non-redundant protein database with the BLASTX™ program, which translates a nucleic acid sequence in all six frames and compares it against available protein databases (BLASTX 1.3 MP:Altschul et al., supra). This protein database is a combination of the SwissProt, PIR, and NCBI GenPept protein databases. One clone was obtained from the IMAGE consortium, and fully sequenced. The additional sequencing of this clone extended the original EST by 267 nucleotides at both the 5′ and 3′ ends. The cDNA for this clone is approximately 746 nucleotides in length and has an open reading frame of 297 nucleotides that is predicted to encode a protein of 98 amino acids.

[1232] The original first pass sequence of the clone showed homology to horse IL-1ra and murine IL-1ra using the BLASTX™ program. The nucleotide sequence and predicted amino acid sequences are shown in SEQ ID NO:89 and SEQ ID NO:90, respectively. The murine SPOIL-I protein (corresponding to amino acids 1-98 of the predicted amino acid sequence, SEQ ID NO:90) shows 37.0% identity to the horse IL-1ra protein and 39.0% identity to the murine IL-1ra protein.

[1233] Alignment of murine SPOIL-I protein with murine IL-1α (SwissProt™ Accession Number P01582) and murine IL-1β (SwissProt™ Accession Number P10749) indicates the presence of an aspartic acid at amino acid residue 91 of SEQ ID NO:90 and amino acid residue 74 of SEQ ID NO:93 which corresponds to an aspartic acid found at amino acid residue 266 of murine IL-1α and amino acid residue 261 of murine IL-1β. In addition, alignment of murine SPOIL-I with murine IL-1ra indicates that this aspartic acid residue of SPOIL-I corresponds with a lysine at amino acid residue 171 of murine IL-1ra (or amino acid residue 145 of mature murine IL-1ra) which has been shown to convert IL-1ra into an agonist by mutating this lysine residue to an aspartic acid residue. (Ju et al. (1991) Proc. Natl. Acad. Sci. USA 88:2658-2662).

[1234] This murine SPOIL-I protein contains an IL-1 signature domain (corresponding to amino acids 58-80 of the predicted amino acid sequence, SEQ ID NO:90 and amino acids 41-63 of SEQ ID NO:93) and a signal sequence (corresponding to amino acids 1-17 of the predicted amino acid sequence, SEQ ID NO:90) which is cleaved to form a mature SPOIL-I protein (corresponding to amino acids 1-81 of SEQ ID NO:93). The predicted molecular weight for the 98 amino acid SPOIL-I is approximately 10.96 kDa and the predicted molecular weight for mature SPOIL-I (SEQ ID NO:93) is approximately 9.1 kDa.

[1235] A GenBank™ search using the murine SPOIL nucleotide sequence of SEQ ID NO:89 revealed a human EST (W78043) which was similar to a region of the nucleotide sequence of SEQ ID NO:89. As no reading frame can be determined from an EST (such as the EST identified in the above database search) an amino acid sequence encoded by an EST can not be determined.

[1236] The entire cDNA of mouse SPOIL-I was used as a probe to screen a mouse esophagus library to search for alternate SPOIL transcripts. A second form of mouse SPOIL was isolated and sequenced. This second form encodes a protein of 160 amino acid residues that lacks a signal peptide. Accordingly, this isoform, designated murine SPOIL-II is predicted to be an intracellular protein. Alignment of the 2 mouse SPOIL proteins (FIG. 5B) shows that they are identical at the C-terminus but have differing N-termini. For example, murine SPOIL-I and SPOIL-II exhibit 100% identity when amino acid residues 29-98 of murine SPOIL-I are aligned to amino acid residues 91-160 of murine SPOIL-II . It is predicted that the two isoforms of murine SPOIL are splice variants of the murine SPOIL gene.

[1237] A global alignment of murine SPOIL-I (SEQ ID NO:90) with murine SPOIL-II (SEQ ID NO:113) using the ALIGN program version 2.0 (global alignment program, Myers and Miller, CABIOS, 1989) using a PAM120 weight residue table, a gap length penalty of 12 and a gap penalty of 4 indicated that the proteins are 46.3% identical over the entire length of the sequences (FIG. 5B).

Isolation of Human SPOIL-I and SPOIL-II cDNAs

[1238] A cDNA library was constructed using mRNA isolated from near confluent monolayers of human keratinocytes (Clonetics™) which had been stimulated with 50 ng/ml PMA, 1 μg/ml ionomycin, 10 ng/ml TNF, and 40 μg/ml cycloheximide for 4 hours. EST sequencing information was gathered to create a proprietary database of information describing the keratinocyte cDNA clones. Three clones were identified by performing a TBLASTN search of the proprietary EST database using the sequence of murine SPOIL-I as a query sequence (the three clones having a probability score of at least 1.4e−48).

[1239] The nucleotide sequence and predicted amino acid sequences of human SPOIL-I are shown in SEQ ID NO:101 and SEQ ID NO:102, respectively. The nucleotide sequence and predicted amino acid sequences of human SPOIL-II are shown in SEQ ID NO:104 and SEQ ID NO:105, respectively. A global alignment of human SPOIL-I (SEQ ID NO:102) with human SPOIL-II (SEQ ID NO:105) using the ALIGN program version 2.0 (global alignment program, Myers and Miller, CABIOS, 1989) using a PAM120 weight residue table, a gap length penalty of 12 and a gap penalty of 4 indicated that the proteins are 80.8% identical over the entire length of the sequences (FIG. 5A).

[1240] As was the case with the two murine isoforms of SPOIL, the two human SPOIL isoforms exhibit exact identity at the C-terminus and are variant at their N-termini. Human SPOIL-II has an insertion of 40 amino acid residues close to the N-terminus of the protein which are not present in human SPOIL-I. Like murine SPOIL-II, both human SPOIL isoforms lack a signal sequence, and accordingly, are predicted to be intracellular proteins. Human SPOIL-I and SPOIL-II may be splice variants of a common gene. An alignment of human SPOIL-I (SEQ ID NO:102) with murine SPOIL-I (SEQ ID NO:90) using the ALIGN program (parameters set as described for the alignment of human SPOILS I and II) indicated that the proteins are 26.3% identical over the entire length of the sequences, e.g., global alignment. Moreover, using the same program and parameters, it was determined that the nucleic acids which encode murine SPOIL-I (SEQ ID NO:89) and human SPOIL-II (SEQ ID NO:101) are 39.8% identical at the nucleotide level. An alignment of human SPOIL-II (SEQ ID NO:105) with murine SPOIL-II (SEQ ID NO:113) using the ALIGN program (parameters set as described above) indicated that the proteins are 37.3% identical over the entire length of the sequences, e.g., global alignment.

[1241] When locally aligned, the identity between the four SPOIL proteins described above is significant. TABLE VII sets forth the % identity among SPOIL family members (when the C-terminal unique domains of each family member are compared). Moreover, TABLE VII sets forth the % identity between each SPOIL C-terminal unique domain and murine IL-1ra. The alignment was performed using the Lipman-Pearson Algorithm (Lipman et al. (1985) Science 227:1435-1441), with a K-tuple of 2, a Gap Penalty of 4, and a Gap Weight Penalty of 12.

TABLE VII

| | muSPOIL- | muSPOIL- | huSPOIL- | huSPOIL- | muIL- |
|---|---|---|---|---|---|
| | I | II | I | II | 1ra |
| muSPOIL-I | 100 | | | | |
| muSPOIL-II | 97.1 | 100 | | | |
| huSPOIL-I | 52.2 | 53.6 | 100 | | |
| huSPOIL-II | 52.2 | 53.6 | 100 | 100 | |
| muIL-ra | 36.2 | 37.7 | 39.7 | 39.7 | 100 |

[1242] Alignment of the four SPOIL family members resulted in the generation of at least two SPOIL consensus motifs, due to the highly conserved nature of specific amino acid residues among the family members. The SPOIL consensus motifs (“SPOIL signature motifs”) are set forth as SEQ ID NOs:110-111 (SEQ ID NO:110 corresponds to the short SPOIL signature motif and SEQ ID NO:111 corresponds to the long SPOIL consensus motif). Short and long SPOIL consensus motifs are found, for example, from amino acid residues 26-69 and 26-93 of muSPOIL-I, from residues 88-131 and 88-155 of muSPOIL-II, from residues 98-141 and 98-164 of huSPOIL-I, and from residues 137-180 and 137-203 of huSPOIL-II.

[1243] Further alignment of the intracellular SPOIL isoforms indicates that the proteins have at least 50% identity among the SPOIL unique domains of the proteins. TABLE VIII sets forth the % identity among SPOIL family members (when the SPOIL unique domains of each family member are compared). The alignment was performed using the Lipman-Pearson Algorithm (Lipmanet al. (1985) Science 227:1435-1441), with a K-tuple of 2, a Gap Penalty of 4, and a Gap Weight Penalty of 12.

TABLE VIII

| | muSPOIL-II | huSPOIL-I | huSPOIL-II |
|---|---|---|---|
| muSPOIL-II | 100 | | |
| huSPOIL-I | 50.3 | 100 | |
| huSPOIL-II | 50.3 | 100 | 100 |

### Example 22

### Distribution and Expression of SPOIL-I mRNA in Mouse and Human Tissues In Situ Hybridization Analysis of Mouse Tissues

[1244] In situ analysis revealed the following expression patterns when tissue sections were hybridized with SPOIL-I probes. SPOIL-I mRNA was expressed almost exclusively in the squamous epithelium of the esophagus in both adult and embryonic mouse tissues. SPOIL-I mRNA was also expressed in the epithelial lining of the mouth in adult mouse tissues and embryonic mouse tissues.

[1245] Moreover, in situ analysis of tissue samples for mice which had been intravenously injected with 20 mg/kg of lippopolysaccharide (LPS) revealed that SPOIL-I expression was induced in the kidney.

### Northern Blot Analysis of Human Tissues

[1246] Northern blot analysis of human tissues confirmed the pattern of SPOIL expression with SPOIL-I transcripts being detected in esophagus and, likely, trachea, among the tissues tested. In addition, SPOIL-I was also present on human esophageal tumor samples and overexpressed in moderately differentiated squamous cell carcinoma of the esophagus.

### Expression of SPOIL in Human and Mouse Cell Lines

[1247] Human SPOIL-I expression was induced in keratinocytes (Clonetics) 2 hours following induction with 50 ng/ml PMA, 1 ug/mL ionomycin, 10 ng/ml TNF and 40 ug/mL cyclohexamide. No expression was observed in unstimulated cultures.

[1248] Moreover, inducible expression of mouse SPOIL-I was observed in the monocytic cell line J774, 24 h after treatment with 0.1 μg/ml LPS.

### Example 23

### Expression of Recombinant SPOIL-I Protein in Bacterial Cells

[1249] SPOIL can be expressed as a recombinant glutathione-S-transferase (GST) fusion polypeptide in E. coli and the fusion polypeptide can be isolated and characterized. Specifically, SPOIL is fused to GST and this fusion polypeptide is expressed in E. coli, e.g., strain PEB199. As, for example, the murine SPOIL-I protein is predicted to be approximately 9.1 kDa and the GST is predicted to be approximately 26 kDa, the fusion polypeptide is predicted to be approximately 35.1kDa in molecular weight. Expression of the GST-SPOIL-I fusion protein in PEB199 is induced with IPTG. The recombinant fusion polypeptide is purified from crude bacterial lysates of the induced PEB 199 strain by affinity chromatography on glutathione beads. Using polyacrylamide gel electrophoretic analysis of the polypeptide purified from the bacterial lysates, the molecular weight of the resultant fusion polypeptide is determined.

### Example 24

### Expression of Recombinant SPOIL Proteins in COS Cells

[1250] To express the murine SPOIL-I gene, for example, in COS cells, the pcDNA/Amp vector by Invitrogen Corporation (San Diego, Calif.) is used. This vector contains an SV40 origin of replication, an ampicillin resistance gene, an E. coli replication origin, a CMV promoter followed by a polylinker region, and an SV40 intron and polyadenylation site. A DNA fragment encoding the entire SPOIL-I protein and a HA tag (Wilson et al. (1984) Cell 37:767) fused in-frame to its 3′ end of the fragment is cloned into the polylinker region of the vector, thereby placing the expression of the recombinant protein under the control of the CMV promoter.

[1251] To construct the plasmid, the SPOIL-I DNA sequence is amplified by PCR using two primers. The 5′ primer contains the restriction site of interest followed by approximately twenty nucleotides of the SPOIL-I coding sequence starting from the initiation codon; the 3′ end sequence contains complementary sequences to the other restriction site of interest, a translation stop codon, the HA tag and the last 20 nucleotides of the SPOIL-I coding sequence. The PCR amplified fragment and the pcDNA/Amp vector are digested with the appropriate restriction enzymes and the vector is dephosphorylated using the CIAP enzyme (New England Biolabs, Beverly, Mass.). Preferably the two restriction sites chosen are different so that the SPOIL-I gene is inserted in the correct orientation. The ligation mixture is transformed into E. coli cells (strains HB101, DH5a, SURE, available from Stratagene Cloning Systems, La Jolla, Calif., can be used), the transformed culture is plated on ampicillin media plates, and resistant colonies are selected. Plasmid DNA is isolated from transformants and examined by restriction analysis for the presence of the correct fragment.

[1252] COS cells are subsequently transfected with the SPOIL-I-pcDNA/Amp plasmid DNA using the calcium phosphate or calcium chloride co-precipitation methods, DEAE-dextran-mediated transfection, lipofection, or electroporation. Other suitable methods for transfecting host cells can be found in Sambrook, J., Fritsh, E. F., and Maniatis, T. Molecular Cloning: A Laboratory Manual. 2nd, ed., Cold Spring Harbor Laboratory, Cold Spring Harbor Laboratory Press, Cold Spring Harbor, NY, 1989. The expression of the SPOIL-I protein is detected by radiolabelling (³⁵S-methionine or ³⁵S-cysteine available from NEN, Boston, Mass., can be used) and immunoprecipitation (Harlow, E. and Lane, D. Antibodies: A Laboratory Manual, Cold Spring Harbor Laboratory Press, Cold Spring Harbor, N.Y., 1988) using an HA specific monoclonal antibody. Briefly, the cells are labeled for 8 hours with ³⁵S-methionine (or ³⁵S-cysteine). The culture media are then collected and the cells are lysed using detergents (RIPA buffer, 150 mM NaCl, 1% NP-40, 0.1% SDS, 0.5% DOC, 50 mM Tris, pH 7.5). Both the cell lysate and the culture media are precipitated with an HA specific monoclonal antibody. Precipitated proteins are then analyzed by SDS-PAGE.

[1253] Alternatively, DNA containing the SPOIL-I coding sequence is cloned directly into the polylinker of the pcDNA/Amp vector using the appropriate restriction sites. The resulting plasmid is transfected into COS cells in the manner described above, and the expression of the SPOIL-I protein is detected by radiolabelling and immunoprecipitation using a SPOIL-I specific monoclonal antibody

### Example 25

### Retroviral Delivery of SPOIL Proteins

[1254] Full length SPOIL-I genes were expressed in vivo by retroviral-mediated infection. In this example, the sequence for murine SPOIL-I (amino acids 1-98) was amplified using the following primers;

Forward Primer (SEQ ID NO: 96):
5′ AAAAAAGAAT TCGCCACCAT GTTCAGGATC TTA 3′
Reverse Primer (SEQ ID NO: 97):
5′ TCCTCTGTCG ACTCACTTGT CGTCGTCGTC CTTGTAGTCA
TGTACCACAA TCAT 3′

[1255] The reverse primer placed an epitope tag (Flag sequence) on the 3′ end of the protein. Amplified products were then subcloned into the retroviral vector MSCVneo (Hawley et al. (1994) Gene Therapy 1:136-138), and sequence verified. Bone marrow from 5-fluorouracil treated mice infected with the retrovirus was then transplanted into irradiated mouse recipients and the pathology was reviewed after 5 weeks.

[1256] The spleen and bones of the mouse recipients were taken 5 weeks after transplantation. Disassociated spleen cells, which are a source of osteoclast progenitors, from the SPOIL-I infected mice were plated on top of ST2 bone marrow stromal line in the presence of 1, 25 dihdroxyvitamin D3 as described by Lacey et al. (1995) Endocrinology 136:2367-2376 and Udagawa et al. (1989) Endocrinology 125:1805-1813. In addition, spleen cells from control mice transplanted with marrow infected with retrovirus without the inserted SPOIL-I gene, were plated. After nine days of culture, the number of osteoclasts was determined by staining for tartrate resistant acid phosphatase (TRAP).

[1257] The results of these experiments demonstrated that the number of TRAP positive osteoclasts was dramatically decreased in cultures with the SPOIL-I infected spleen cells as compared to the control cells. Histologically, the bones of mice recipients transplanted with SPOIL-I infected marrow, also appeared to be thicker than the bones of the corresponding control mice. Generally, there was less trabecular bone at the growth plate. The trabecular bone was compressed and thickened with more osteoloid formation and more osteoblasts present.

### Example 26

### Identification And Characterization of NEOKINE-1 cDNAs

[1258] In this example, the identification and characterization of the genes encoding human, murine, rat and macaque NEOKINE-1 (also referred to as “ANTIKINE-1”, “TANGO 112”, or T112) is described.

Isolation of the Murine and Human NEOKINE-1 cDNAs

[1259] The invention is based, at least in part, on the discovery of the murine and human genes encoding a novel protein, referred to herein as NEOKINE-1. In order to identify potentially novel chemokines, using an automated procedure, the human amino acid sequences of the chemokines, interleukin-8, gamma-IP10, Sis-Delta, fractalkine, and SDF-1 were used to search proprietary databases and the dbEST databases using TBLASTN (Wash U. version, 2.0, BLOSUM62 search matrix). Sequences exhibiting 90% or greater identity to any protein present in Genpept, SwissProt, or PIR were marked as examples of these proteins and removed. This analysis identified a mouse EST (accession number AA013634) potentially encoding a chemokine. As the encoded protein was quite divergent from all other chemokine family members, and the open reading frame constituted a small percentage of the total cDNA length (see below), to establish whether this transcript encoded a novel chemokine family member, the nucleotide sequence of the entire cDNA was determined. To do this, first, additional ESTs from the mouse gene were retrieved from public databases by similarity searches. A total of 33 murine sequences were thus retrieved. Second, these sequences were used to create an extensive length of continuous sequence (contig). The 33 murine ESTs were aligned and edited at discrepant bases into a single contig of 1420 bp. The 5′ end of the contig appeared to be missing part of the open reading frame. To extend this sequence, the sizes of the inserts of several of the murine cDNA clones from which the ESTs were derived was determined and one with the largest insert (about 1.45 kb) was subsequently re-sequenced in its entirety. This extended the sequence by 5 by to 1425 bp and corrected some remaining discrepancies.

[1260] 72 human ESTs from a presumptive human orthologue of the above-described mouse gene were identified. However, these ESTs, after a similar assembly and editing, aligned into two non-overlapping contigs of 364 and 1101 bp. Comparison with the murine sequence suggested that the 364-bp contig derived from the 5′ part of the human gene, while the 1101-bp contig derived from the 3′ part of the human gene and included the poly(A) tail. The distribution of 5′ EST reads implied that there was no cDNA clone which contained both halves of the gene. At the 3′ end of the 5′ contig, there was a naturally occurring run of adenosine nucleotides (see below), to which the oligo-d(T) primer used in reverse transcription would have annealed (i.e., this primer would have annealed at two sites: the actual poly (A) tail and this internal oligo (A) stretch). This ectopic primer would have blocked reverse transcription in the human sequence at about 1.1 kb from the 3′ end, but also would have allowed a second set of cDNA molecules to be synthesized which covered the 5′ end of the gene. The two human EST contigs that can be derived from these 72 ESTs therefore would appear on inspection and in the absence of further information, to derive from two genes instead of one. That this is the case is shown by the fact that automated assembly of ESTs produced distinct “UniGene” numbers for the two contigs (Hs.21210 for the 5′ contig and Hs.24395 for the 3′ contig).

[1261] To establish that the two human contigs derived from the same transcript, two primers lacking oligo d(T) were designed from the two assembled human contigs such that they would amplify an ˜300 bp fragment spanning the contigs. Using first-strand cDNA prepared from human placental poly (A)+ RNA, a unique ˜300 bp fragment aws amplified by standard techniques. This cDNA was subsequently cloned and sequenced. The sequence did span the two contigs and provided the missing sequence between them. The primers were h112/227f (CCAAGCGCTTCATCAAGTGG) (SEQ ID NO:125) and h112/526r (GCAGCCTGTGATGAAGTCTGG) (SEQ ID NO:126).

[1262] The 5′ end of the contig, which included part of the open reading frame, was missing from the assembled single contig. To obtain the complete transcript sequence at the 5′ end for the human gene, a cDNA clone (rthp112) extending from the 5′ end of the human transcript to beyond the end of the open reading frame was generated by the RACE procedure. The gene-specific primer used was t112racel (CAGCCTATTCTTCGTAGACCCTGC) (SEQ ID NO:127). The 5′-most 35 bp of this clone formed a palindrome and thus appeared to be a cloning artifact, as is well known in the art, and was removed from the final sequence. The remaining sequence extended the human cDNA sequence by 108 bp to 1564 bp and corrected some remaining discrepancies. Clone rthp112, comprising the entire coding region of human NEOKINE-1 has been deposited with the ATTC and has Accession No. 98751.

[1263] The nucleotide sequence encoding the human NEOKINE-1 protein is set forth as SEQ ID NO:115. The full length protein encoded by this nucleic acid is comprised of about 99 amino acids and has the amino acid sequence set forth as SEQ ID NO:116. The coding portion (open reading frame) of SEQ ID NO:115 is set forth as SEQ ID NO:117.

[1264] To identify a murine cDNA clone containing a near full-length insert, the sizes of the inserts of several of the murine cDNA clones from which the ESTs were derived was determined and one with the largest insert (about 1.45 kb) was subsequently re-sequenced in its entirety. This extended the sequence by 5 bp to 1425 bp and corrected some remaining discrepancies.

[1265] The nucleotide sequence encoding the murine NEOKINE-1 protein is set forth as SEQ ID NO:118. The full length protein encoded by this nucleic acid is comprised of about 92 amino acids and has the amino acid sequence set forth as SEQ ID NO:119. The coding portion (open reading frame) of SEQ ID NO:118 is set forth as SEQ ID NO:120.

### Analysis of Murine and Human NEOKINE-1

[1266] Examination of the assembled and corrected cDNA sequences depicted in SEQ ID NO:115 and SEQ ID NO:118 showed that they likely encoded highly-conserved proteins, human and mouse NEOKINE-1. Based on the presence of 4 cysteine residues, which presumably form 2 disulfide bonds, a predicted signal sequence, a predicted mature peptide mass of about 10,000 daltons, and a characteristic spacing of one residue between the first two cysteines, it was judged that the encoded protein was a novel member of the alpha chemokine family, and a member of the subfamily that lacked the glutamine-leucine-arginine sequence before the first cysteine. However, three atypical features were also present but conserved between species. These were, first, the presence of an extra 5 residues between the second pair of cysteines; second, the fewest residues before the predicted amino terminus of the mature protein and the first cysteine of any naturally-occurring chemokine; and third, a general dissimilarity to all other chemokines in the region between the second and third cysteines.

[1267] A BLAST search (Altschul et al. (1990) J. Mol. Biol. 215:403) of the nucleotide sequence of human NEOKINE-1 has revealed that NEOKINE-1 is significantly similar to a human STS (TIGR-A002114, Accession No. G26440) which was sequenced as part of the WI/MIT human gene mapping project and derived from a TIGR-assembled contig that lacks any of the open reading frame of human NEOKINE-1. (The TIGR-assembled contig failed to reveal the true ORF of human NEOKINE-1, most likely to the existence of a significant number of potential ORFs which fortuitously exist in the long 3′ UTR of the human NEOKINE cDNA, but do not, in fact encode the human NEOKINE-1 protein.) The gene is located to human 5q31.1 near the marker D5S396, distinct from the chemokine cluster on chromosome 4q. Plausible human disease genes that map to this region include a hereditary eosinophilia (EOS) and a hereditary high serum IgE associated with hypersuppression of inflammation in the skin (IGES).

[1268] The clones of both the human and murine EST sequences used in the assembly of the human and murine contigs derive predominantly from prenatal tissues. In particular, 6 human ESTs derive from clones isolated from neonatal female placenta, 4 human ESTs derive from clones isolated from 8-9-week placenta, 4 human ESTs derive from clones isolated from fetal heart, 4 human ESTs derive from clones isolated from 20-week male liver and spleen, 4 human ESTs derive from clones isolated from breast tumor, 4 human ESTs derive from clones isolated from colon tumor, 3 human ESTs derive from clones isolated from adult breast, 2 human ESTs derive from clones isolated from pregnant uterus, 2 human ESTs derive from clones isolated from endometrial tumor, 1 human EST derives from a clone isolated from fetal brain, 1 human EST derives from a clone isolated from alveolar rhabdomyosarcoma, 1 human EST derives from a clone isolated from ovary tumor, 1 human EST derives from a clone isolated from 8-9-week total fetus, 1 human EST derives from a clone isolated from TIGR placenta II, 1 human EST derives from a clone isolated from corneal stroma, 1 human EST derives from a clone isolated from 3 m muscular atrophy, 1 human EST derives from a clone isolated from thyroid tumor, 1 human EST derives from a clone isolated from a 6-week embryo, and 1 human EST derives from a clone isolated from a 12-week embryo. murine ESTs derive from clones isolated from 13.5+14.5d whole embryo, 5 murine ESTs derive from clones isolated from 19.5d embryo, 4 murine ESTs derive from clones isolated from 8.5d embryo, 3 murine ESTs derive from clones isolated from 12.5d embryo, 3 murine ESTs derive from clones isolated from 7d kidney. 2 murine ESTs derive from clones isolated from 13.5+14.5d placenta, 1 murine EST derives from a clone isolated from 6.5/8.5d embryo, 1 murine EST derives from a clone isolated from liver, 1 murine EST derives from a clone isolated from 4-week male thymus, 1 murine EST derives from a clone isolated from diaphragm, and 1 murine, EST derives from a clone isolated from 11-week skin.

Tissue Distribution of NEOKINE-1 mRNA

[1269] This Example describes the tissue distribution of NEOKINE mRNA, as determined by Northern blot and in situ hybridization.

[1270] Northern blot hybridizations with the various RNA samples were performed under standard conditions and washed under stringent conditions, i.e., 0.2×SSC at 65° C. In each sample, the probe hybridized to a single RNA of about 1.9 kb. The results of hybridization of the probe to various mRNA samples are described below.

[1271] Expression in mouse embryos was examined using a developmental mouse Northern (Clontech) and in situ hybridization. This blot had poly(A)+ RNA isolated from whole embryos of age 7, 11, 15 and 17 days. The analysis using the mouse gene as a probe revealed intense expression of a unique 1.9 kb transcript in the 7 d sample, but this may be due to contaminating RNA from the placenta. In the remaining samples, expression was low at 11d, highest on day 15, and then dropped again on day 17.

[1272] Expression in diverse human tissue was examined using tissue-specific Northern blots (Clontech). These blots had poly(A)+ RNA isolated from various disease-free human organs. The analysis using a PCR fragment of the human gene as a probe revealed strongest expression of a unique 1.9 kb transcript in the kidney and small intestine, followed by strong expression in the spleen, uterus and colon, and lower expression in thymus, prostate, stomach, thyroid, spinal cord, lymph node, trachea, adrenal gland, bone marrow, heart, brain placenta, liver, smooth muscle and pancreas. There was little/no expression in lung, peripheral blood leukocytes and testis. The size of the poly(A)+transcript in both human and mouse (1.9 kb) is consistent with the length of the full-length cDNAs (1.56 kb) which lack the poly(A) tails.

[1273] In situ hybridization of a murine antisense probe to various embryonic, post-natal and adult tissues was performed as follows. 8 μm sagittal sections of fresh frozen embryonic day 14.5, 16.5 and postnatal day 1.5 B6 mice, as well as 8 μm sections of various adult B6 mouse tissues (listed below) were used for hybridization. Sections were postfixed with 4% formaldehyde in DEPC treated 1× phosphate-buffered saline at room temperature for 10 min before being rinsed twice in DEPC 1× phosphate-buffered saline and once in 0.1 M triethanolamine-HCl (pH 8.0). Following incubation in 0.25% acetic anhydride-0.1 M triethanolamine-HCl for 10 min, sections were rinsed in DEPC 2×SSC (1×SSC is 0.15M NaCl plus 0.015M sodium citrate). Tissue was dehydrated through a series of ethanol washes, incubated in 100% chloroform for 5 min, and then rinsed in 100% ethanol for 1 min and 95% ethanol for 1 min and allowed to air dry.

[1274] The hybridization was performed using a ³⁵S-radiolabeled cRNA (antisense) probe from the following DNA sequence,

(SEQ ID NO: 128)
GTCCAAGTGTAAGTGTTCCCGGAAGGGGCCCAAGATCCGCTACAGCGA
CGTGAAGAAGCTGGAAATGAAGCCAAAGTACCCACACTGCGAGGAGAA
GATGGTTATCGTCACCACCAAGAGCATGTCCAGGTACCGGGGCCAGGA
GCACTGCCTGCACCCTAAGCTGCAGAGCACCAAACGCTTCATCAAGTG
GTACAATGCCTGGAACGAGAAGCGCAGGGTCTACGAAGAATAGGGTGG
ACGATCATGGAAAGAAAAACTCCAGGCCAGTTGAGAGACTTCAGCAGA
GGACTTTGCAGATTAAAATAAAAGCCCTTTCTTTCTCACAAGCATAAG
ACAAATTATATATTGCTATGAAGCTCTTCTTACCAGGGTCAGTTTTTA
CATTTTATAGCTGTGTGTGAAAGGCTTCCAGATGTGAGATCCAGCTCG
CCTGCGCACCAGACTTCATTACAAGTGGCTTTTTGCTGGGCGGTTG.

[1275] A sense RNA probe made from the same DNA sequence was used to determine specificity of the antisense probe. Tissues were incubated with probes (approximately 5×10⁷ cpm/ml) in the presence of a solution containing 600 mM NaCl, 10 mM Tris (pH 7.5), 1 mM EDTA, 0.01% sheared salmon sperm DNA, 0.01% yeast tRNA, 0.05% yeast total RNA type X1, 1×Denhardt's solution, 50% formamide, 10% dextran sulfate, 100 mM dithiothreitol, 0.1% sodium dodecyl sulfate (SDS), and 0.1% sodium thiosulfate for 18 h at 55° C. After hybridization, slides were washed with 2×SSC. Sections were then sequentially incubated at 37° C. in TNE (a solution containing 10 mM Tris-HCl (pH 7.6), 500 mM NaCl, and 1 mM EDTA), for 10 min, in TNE with 10 μg of RNase A per ml for 30 min, and finally in TNE for 10 min. Slides were then rinsed with 2×SSC at room temp, washed with 2×SSC at 50° C. for 1 h, washed with 0.2×SSC at 55° C. for 1 h, and 0.2×SSC at 60° C. for 1 h. Sections were then dehydrated rapidly through serial ethanol-0.3 M sodium acetate concentrations before being air dried and exposed to Kodak Biomax MR scientific imaging film for 4 days at room temperature.

[1276] Following a 4 day film exposure, NEOKINE mRNA was detectable in the following tissues (Note: Tissues incubated with sense probe showed no signal in any tissues):

### Adult Mouse:

[1277] Brain—multifocal signal in the cortex
Purkinje cell layer of the cerebellum
areas of the hippocampus and forebrain
a small discrete region in the ventral portion of the hindbrain
low level ubiquitous signal in most other regions
eye—multifocal signal seen in harderian gland
anterior surface of lens/cornea
retina
descending colon—focal signal
transverse/ascending colon—multifocal signal
small Intestine—villi
kidney—cortical region
adrenal gland—medulla region and capsule
heart—multifocal signal
skeletal muscle—multifocal signal
lung—signal outlining the large airways
thymus—low signal
bladder—high signal from the transitional epithelium
placenta—signal seen in the outer membrane/cell layer
The following tissues were tested but no signal was detected in:
spleen
liver
Postnatal Day 1.5 mouse:
brain—specific regions, most notably the cortex
no ubiquitous expression as seen in adult
nasal turbinates
developing upper and lower teeth
trachea
uterus
sternebral cartilage
kidney—medulla and outermost cortex in a multifocal pattern
skin and hair follicles—very strong signal
intestine
note: no signal observed in lung
Embryonic Day 16.5 mouse:
brain—specific regions, most notably the cortex
no ubiquitous expression as seen in adult
spinal cord—low signal
esophagus
lung—signal from large airways
adrenal gland—cortical region (note: opposite of adult)
kidney—medulla and outermost cortex in a multifocal pattern
skin—very strong signal
intestine
Embryonic Day 14.5 mouse:
brain—discrete regions, most notable a region in the hindbrain
lung—signal from large airways
skin—very strong signal especially from whisker pads and tip of nose and tail
umbilical cord
intestine

[1278] These results reveal a striking distribution of NEOKINE mRNA in various non-lymphoid organs. The fact that many normal tissues express abundant NEOKINE transcript suggests that these tissues make significant quantities of NEOKINE protein and that therefore the pro-inflammatory or chemoattractive activities of NEOKINE are very low or non-existent. Indeed, NEOKINE is expressed most significantly in highly immunoreactive tissues that are involved in barrier functions. This observation is consistent with a proposed role of NEOKINE as a suppressor of inflammation. Furthermore, the predicted amino terminus of mature NEOKINE lies just two residues from the first cysteine. In an analogous situation, an artificially truncated form of human IL-8 with only one residue before the first cysteine instead of the normal 6 residues converts the protein from an agonist to an antagonist of its cognate receptor. These observations are further consistent with the proposed anti-inflammatory activity being mediated by antagonizing the action of other pro-inflammatory chemokines. The general divergence of NEOKINE from other alpha chemokines while being highly conserved itself, and the presence of the extra 5 residues between the second pair of cysteines could also be consistent with a broad antagonist function on a diverse set of chemokine receptors. The strong expression in the skin, the kidney, the bronchii and the brain indicates that NEOKINES have utility in treating inflammation of these organs, such as occurs in acute renal failure, transplantation, allergy and infection. Furthermore, since the human AIDS virus HIV uses some chemokine receptors as co-receptors for infection, NEOKINES may also have utility in slowing or blocking infection by HIV.

### Example 27

### Isolation And Characterization of Rat and Macaque NEOKINE-1 cDNAs

[1279] During routine tests for sequences similar to mouse or human NEOKINE cDNA, one EST deriving from a rat brain cDNA and three ESTs deriving from macaque brain cDNAs were identified in a database of proprietary sequences. The database derives, at least in part, from sequencing of various mammalian clones generated from cDNA libraries created according to routine procedures. The cDNAs originated from rat brain and macaque brain libraries, respectively.

[1280] The nucleotide sequence encoding the at least 78 amino acid residues of the rat NEOKINE-1 protein (corresponding to the predicted mature protein) is set forth as SEQ ID NO:121. The amino acid sequence for mature rat NEOKINE-1 is set forth as SEQ ID NO:122. The coding portion (open reading frame) of SEQ ID NO:121 is set forth as SEQ ID NO:123. The nucleotide sequence and predicted amino acid sequence of macaque NEOKINE-1 are set forth as SEQ ID NO:124 and SEQ ID NO:135, respectively.

[1281] Examination of the cDNA sequence depicted in SEQ ID NO:121 shows that rat NEOKINE-1 comprises four cysteine residues which are conserved among all NEOKINE-1 family members identified thus far. Structural analysis of these proteins indicates that these cysteines are capable of forming 2 disulfide bridges. FIG. 8 depicts the alignment between the four NEOKINE-1 amino acid sequences identified according to these Examples.

### Example 28

### Secretion of NEOKINE Chemokines

[1282] Expression constructs for RGSHis6 epitope-tagged (C-terminus) human NEOKINE were transfected into 293T cells using lipofectamine (GIBCO/BRL) according to the manufacturers instructions. After culturing in appropriate medium for 48-72 hours, conditioned medium was harvested, spun, filtered, and passed over nickel metal chelating column (Qiagen). After washing, bound material was eluted 200 mM imidazole buffer and fractions collected. Peak fractions were analyzed by SDS-PAGE and western blot using anti His6 antibodies (Quiagen). Purified NEOKINE protein bound to PVDF membrane after SDS-PAGE and electroblotting was sequenced for N-terminal amino acid analysis using Edman-based chemistry protein sequencing. The amino acid residues were analyzed by HPLC and determined by separation and peak height as compared to standards.

[1283] The N-terminal sequence of band NEOKINE was found to be SKCKCSRKGP which corresponds exactly to the predicted signal peptide cleavage site (between Gly22 and Ser23). Because the same band is identified by anti-His6 antibodies, which recognize the C-terminal epitope tag, the band was identified as the full length, mature NEOKINE protein.

### Example 29

### Binding of NEOKINE to the NEOKINE Receptor (e.g., RDC1)

[1284] T112 (NEOKINE) was radioiodinated with lactoperoxidase according to standard protocols. RDC-1 in vector Pcdna3.1 was transiently transfected into 293 cells using calcium phosphate precipitation methodology. 72 hours after transfection, cells were harvested and binding assays performed under standard binding conditions for chemokines (e.g., low salt binding, high salt wash, binding at 24° C., 1 hour). Cells were then pelleted, washed, and radioactivity was counted. Binding was demonstrated and was determined to be high affinity by competition with unlabelled T112. The cpm bound in cell pellets in indicated below.

| | | | |
|---|---|---|---|
| ¹²⁵I-T112 | 0.1 nm | 37613.0 cpm | 27014.0 cpm |
| T112 | 3.0 nm | 8343.0 cpm | 9229.0 cpm |

### Example 30

### Isolation and Characterization of Human T129 cDNAs

[1285] Human mesangial cells (Clonetics Corporation; San Diego, Calif.) were expanded in culture with Mesangial Cell Growth Media (Clonetics) according to the recommendations of the supplier. When the cells reached 80-90% confluence, they were stimulated with tumor necrosis factor (TNF; 10 ng/ml) and cycloheximide (CHI; 40 micrograms/ml) for 4 hours. Total RNA was isolated using the RNeasy Midi Kit (Qiagen; Chatsworth, Calif.), and the poly A+ fraction was further purified using Oligotex beads (Qiagen).

[1286] Three micrograms of poly A+ RNA were used to synthesize a cDNA library using the Superscript cDNA Synthesis kit (Gibco BRL; Gaithersburg, Md.). Complementary DNA was directionally cloned into the expression plasmid pMET7 using the SalI and NotI sites in the polylinker to construct a plasmid library. Transformants were picked and grown up for single-pass sequencing.

[1287] One clone, jthKb042d12, showed limited homology to OX40 (Latza et al. (1994) Eur. J. Immunol. 24:677), a member of the TNF receptor superfamily, and was sequenced further. Complete sequencing of the clone revealed an approximately 2.5 kb cDNA insert with a 1290 base pair open reading frame predicted to encode a novel 430 amino transmembrane protein.

### Example 31

### Distribution of T129 mRNA in Human Tissues

[1288] The expression of T129 was analyzed using Northern blot hybridization. A 567 bp portion of T129 cDNA encoding the amino terminus of T129 protein was generated by PCR. The DNA was radioactively labeled with ³²P-dCTP using the Prime-It kit (Stratagene; La Jolla, Calif.) according to the instructions of the supplier. Filters containing human mRNA (MTNI and MTNII: Clontech; Palo Alto, Calif.) were probed in ExpressHyb hybridization solution (Clontech) and washed at high stringency according to manufacturer's recommendations.

[1289] These studies revealed that T129 is expressed as an approximately 3.0 kilobase transcript at moderate levels in peripheral blood leukocytes, spleen, and skeletal muscle. Lower levels of transcript were seen in heart, brain and placenta. In addition, a hybridization signal was seen in peripheral blood leukocytes at >15 kb.

### Example 32

### Characterization of T129 Proteins

[1290] In this example, the predicted amino acid sequence of human T129 protein was compared to amino acid sequences of known proteins and various motifs were identified. In addition, the molecular weight of the human T129 proteins was predicted.

[1291] The human T129 cDNA isolated as described above (SEQ ID NO:137) encodes a 430 amino acid protein (SEQ ID NO:138). The signal peptide prediction program SIGNALP Optimized Tool (Nielsen et al. (1997) Protein Engineering 10:1-6) predicted that T129 includes a 22 amino acid signal peptide (amino acid 1 to about amino acid 22 of SEQ ID NO:137) preceding the 408 mature protein (about amino acid 23 to amino acid 430; SEQ ID NO:140). T129 also include one predicted transmembrane domain (amino acids 163-186 of SEQ ID NO:138). A hydropathy plot of T129 is presented in FIG. 9. This plot shows the two predicted TM domains as well as a extracellular region (labelled “OUT”; amino acids 31 to 162 of SEQ ID NO:138) and a cytoplasmic region (labelled “IN”; amino acids 187 to 430 of SEQ ID NO:138) as well as the location of cysteines (“cys”; short vertical lines just below plot) and the TNFR/NGFR cysteine-rich domain indicated by its PFAM identifier (PF0020; bar just above plot). For general information regarding PFAM identifiers refer to Sonnhammer et al. (1997) Protein 28:405-420.

[1292] T129 has a region (amino acids 51-90; SEQ ID NO:142) of homology to a TNFR/NGFR cysteine-rich domain consensus derived from a hidden Markov model (SEQ ID NO:141). The TNFR/NGFR cysteine-rich domain of T129 does not include all the conserved cysteines usually present in such domains (4 of 6). Moreover, unlike other members of the TNF superfamily, T129 includes only one such domain; most TNF family members include two to four such cysteine rich domains.

[1293] Mature T129 has a predicted MW of 43.5 kDa (46 kDa for immature T129), not including post-translational modifications.

### Example 33

### Preparation of T129 Proteins

[1294] Recombinant T129 can be produced in a variety of expression systems. For example, the mature T129 peptide can be expressed as a recombinant glutathione-S-transferase (GST) fusion protein in E. coli and the fusion protein can be isolated and characterized. Specifically, as described above, T129 can be fused to GST and this fusion protein can be expressed in E. coli strain PEB199. Expression of the GST-T129 fusion protein in PEB 199 can be induced with IPTG. The recombinant fusion protein can be purified from crude bacterial lysates of the induced PEB 199 strain by affinity chromatography on glutathione beads.

### Deposit of Microorganisms

[1295] A nucleic acid encoding a full-length human Delta protein is contained in a plasmid which was deposited with the American Type Culture Collection, 10801 University Boulevard, Manassas, Va. 20110-2209 (ATCC®) on Mar. 5, 1997 and has been assigned ATCC® accession number 98348.

[1296] A clone containing the cDNA molecule encoding human A259, (clone Human 12) was deposited with the American Type Culture Collection, 10801 University Boulevard, Manassas, Va., 20110-2209, on Apr. 2, 1999 as Accession Number 207190, as a single deposit.

[1297] A clone containing the cDNA molecule encoding mouse A259, (clone Mouse 12) was deposited with the American Type Culture Collection, 10801 University Boulevard, Manassas, Va., 20110-2209, on Apr. 2, 1999 as Accession Number 207191, as a single deposit.

### EQUIVALENTS

[1298] Those skilled in the art will recognize, or be able to ascertain using no more than routine experimentation, many equivalents of the specific embodiments of the invention described herein.

[1299] Such equivalents are intended to be encompassed by the following claims.

[1300] All publications, patents and patent applications mentioned in this specification are herein incorporated by reference into the specification to the same extent as if each individual publication, patent or patent application was specifically and individually indicated to be incorporated herein by reference.

1-12. (canceled)

13. An isolated nucleic acid molecule selected from the group consisting of: a) a nucleic acid molecule comprising a nucleotide sequence which is at least 80% identical to the nucleotide sequence of SEQ ID NO: 1 or SEQ ID NO:3; b) a nucleic acid molecule comprising a fragment of at least 500 nucleotides of the nucleotide sequence of SEQ ID NO:1 or SEQ ID NO:3; c) a nucleic acid molecule which encodes a polypeptide comprising the amino acid sequence of SEQ ID NO:2; d) a nucleic acid molecule which encodes a fragment of a polypeptide comprising the amino acid sequence of SEQ ID NO:2, wherein the fragment comprises at least 100 contiguous amino acids of SEQ ID NO:2; and e) a nucleic acid molecule which encodes a naturally occurring allelic variant of a polypeptide comprising the amino acid sequence of SEQ ID NO:2, wherein the nucleic acid molecule hybridizes to a nucleic acid molecule comprising SEQ ID NO:1, 3, or a complement thereof, under stringent conditions.

14. The isolated nucleic acid molecule of claim 13, further comprising a fragment of at least 1000 nucleotides of the nucleotide sequence of SEQ ID NO:1 or SEQ ID NO:3.

15. The isolated nucleic acid molecule of claim 13, further comprising a fragment of at least 1500 nucleotides of the nucleotide sequence of SEQ ID NO:1 or SEQ ID NO:3.

16. The isolated nucleic acid molecule of claim 13, further comprising a fragment of at least 2000 nucleotides of the nucleotide sequence of SEQ ID NO:1 or SEQ ID NO:3.

17. The isolated nucleic acid molecule of claim 13, which encodes a fragment of a polypeptide comprising the amino acid sequence of SEQ ID NO:2, wherein the fragment comprises at least 100 contiguous amino acids of SEQ ID NO:2.

18. The isolated nucleic acid molecule of claim 13, which encodes a fragment of a polypeptide comprising the amino acid sequence of SEQ ID NO:2, wherein the fragment comprises at least 200 contiguous amino acids of SEQ ID NO:2.

19. The isolated nucleic acid molecule of claim 13, which is selected from the group consisting of: a) a nucleic acid comprising the nucleotide sequence of SEQ ID NO:1 or SEQ ID NO:3; and b) a nucleic acid molecule which encodes a polypeptide comprising the amino acid sequence of SEQ ID NO:2.

20. The nucleic acid molecule of claim 13 further comprising vector nucleic acid sequences.

21. The nucleic acid molecule of claim 13 further comprising nucleic acid sequences encoding a heterologous polypeptide.

22. A host cell which contains the nucleic acid molecule of claim 13.

23. The host cell of claim 22 which is a mammalian host cell.

24. A non-human mammalian host cell containing the nucleic acid molecule of claim 13.

25. An isolated polypeptide selected from the group consisting of: a) a polypeptide which is encoded by a nucleic acid molecule comprising a nucleotide sequence which is at least 80% identical to a nucleic acid comprising the nucleotide sequence of SEQ ID NO:1, SEQ ID NO:3, or a complement thereof; b) a naturally occurring allelic variant of a polypeptide comprising the amino acid sequence of SEQ ID NO:2, wherein the polypeptide is encoded by a nucleic acid molecule which hybridizes to a nucleic acid molecule comprising SEQ ID NO:1 or SEQ ID NO:3; and c) a fragment of a polypeptide comprising the amino acid sequence of SEQ ID NO:2, wherein the fragment comprises at least 100 contiguous amino acids of SEQ ID NO:2.

26. The isolated polypeptide of claim 25, comprising a fragment which comprises at least 100 contiguous amino acids of SEQ ID NO:2.

27. The isolated polypeptide of claim 25, comprising a fragment which comprises at least 200 contiguous amino acids of SEQ ID NO:2.

28. The isolated polypeptide of claim 25, comprising a fragment which comprises at least 500 contiguous amino acids of SEQ ID NO:2.

29. The isolated polypeptide of claim 25, comprising a fragment which is at least 90% homologous to the amino acid sequence of SEQ ID NO:2.

30. The isolated polypeptide of claim 25, comprising a fragment which is at least 95% homologous to the amino acid sequence of SEQ ID NO:2.

31. The isolated polypeptide of claim 25, comprising the amino acid sequence of SEQ ID NO:2.

32. The isolated polypeptide of claim 25 further comprising heterologous amino acid sequences.

33. An antibody which selectively binds to a polypeptide of claim 25.

34. The antibody of claim 33, which is a monoclonal antibody.

35. The antibody of claim 34, comprising an immunologically active portion selected from the group consisting of: a) an scFV fragment; b) a dcFV fragment; c) an Fab fragment; and d) an F(ab′).sub.2 fragment.

36. The antibody of claim 34, wherein the antibody is selected from the group consisting of: a) a chimeric antibody; b) a humanized antibody; c) a human antibody; d) a non-human antibody; and e) a single chain antibody.

37. A method for producing a polypeptide selected from the group consisting of: a) a polypeptide comprising the amino acid sequence of SEQ ID NO:2; b) a polypeptide comprising a fragment of the amino acid sequence of SEQ ID NO:2, wherein the fragment comprises at least 100 contiguous amino acids of SEQ ID NO:2; c) a naturally occurring allelic variant of a polypeptide comprising the amino acid sequence of SEQ ID NO:2, or the amino acid sequence encoded by the cDNA insert of the plasmid deposited with the ATCC as Accession Number ______, wherein the polypeptide is encoded by a nucleic acid molecule which hybridizes to a nucleic acid molecule comprising SEQ ID NO:1, SEQ ID NO:3, or a complement thereof under stringent conditions; comprising culturing the host cell of claim 22 under conditions in which the nucleic acid molecule is expressed.

38. A method for detecting the presence of a polypeptide of claim 25 in a sample, comprising: contacting the sample with a compound which selectively binds to a polypeptide of claim 25; and determining whether the compound binds to the polypeptide in the sample.

39. The method of claim 38, wherein the compound which binds to the polypeptide is an antibody.

40. A kit comprising a compound which selectively binds to a polypeptide of claim 25 and instructions for use.

41. A method for detecting the presence of a nucleic acid molecule of claim 13 in a sample, comprising the steps of: contacting the sample with a nucleic acid probe or primer which selectively hybridizes to the nucleic acid molecule; and determining whether the nucleic acid probe or primer binds to a nucleic acid molecule in the sample.

42. The method of claim 41, wherein the sample comprises mRNA molecules and is contacted with a nucleic acid probe.

43. A kit comprising a compound which selectively hybridizes to a nucleic acid molecule of claim 13 and instructions for use.

44. A method for identifying a compound which binds to a polypeptide of claim 25 comprising the steps of: contacting a polypeptide, or a cell expressing a polypeptide of claim 25 with a test compound; and determining whether the polypeptide binds to the test compound.

45. The method of claim 44, wherein the binding of the test compound to the polypeptide is detected by a method selected from the group consisting of: a) detection of binding by direct detecting of test compound/polypeptide binding; b) detection of binding using a competition binding assay; and c) detection of binding using an assay for Delta3-mediated signal transduction.

46. A method for modulating the activity of a polypeptide of claim 25 comprising contacting a polypeptide or a cell expressing a polypeptide of claim 25 with a compound which binds to the polypeptide in a sufficient concentration to modulate the activity of the polypeptide.

47. A method for identifying a compound which modulates the activity of a polypeptide of claim 25, comprising: contacting a polypeptide of claim 25 with a test compound; and determining the effect of the test compound on the activity of the polypeptide to thereby identify a compound which modulates the activity of the polypeptide.

48. An isolated antibody, or portion thereof, that specifically binds to a polypeptide selected from the group consisting of: a) the polypeptide comprising the amino acid sequence of SEQ ID NO:2; b) the polypeptide encoded by the nucleic acid molecule of SEQ ID NO: 1 or 3; and c) the polypeptide encoded by the nucleotide sequence contained in the plasmid deposited with the ATCC as Accession number 98348.

49. The antibody, or portion thereof, of claim 48, wherein said antibody specifically binds to the polypeptide comprising the amino acid sequence of SEQ ID NO:2.

50. The antibody, or portion thereof, of claim 48, wherein said antibody specifically binds to the polypeptide encoded by the nucleic acid molecule of SEQ ID NO: 1 or 3.

51. The antibody, or portion thereof, of claim 48, wherein said antibody specifically binds to the polypeptide encoded by the nucleotide sequence contained in the plasmid deposited with the ATCC as Accession number 98348.

52. The antibody, or portion thereof, of claim 48, wherein said antibody is selected from the group consisting of: i) a monoclonal antibody; ii) a polyclonal antibody; iii) a bispecific antibody; and iii) a chimeric antibody.

53. The antibody, or portion thereof, of claim 48, wherein said portion is a F(ab) fragment or a F(ab′).sub.2 fragment.

54. The antibody, or portion thereof, of claim 48, wherein said antibody binds to amino acid residues 18-529 of SEQ ID NO:2.

55. The antibody, or portion thereof, of claim 48, wherein said antibody is detectably labeled.

56. The antibody, or portion thereof, of claim 55, wherein the detectable label is selected from the group consisting of: a) an enzyme; b) a fluorescent material; c) a luminescent material; d) a bioluminescent material; and e) a radioactive material.

The application's sequence listing, which the Patent Office published only in electronic form, follows.

SEQUENCE LISTING (195 sequences)

SEQ ID NO: 1 - DNA, 2800 bp, Homo sapiens
  CDS (338)..(2395)
gtcgacccacgcgtccggctgcgcgcaggccgggaacacgaggccaagagccgcagccccagccgccttggtgcagcgtacaccggcactagcccgcttgcagccccaggattagacagaagacgcgtcctcggcgcggtcgccgcccagccgtagtcacctggattacctacagcggcagctgcagcggagccagcgagaaggccaaaggggagcagcgtcccgagaggagcgcctcttttcagggaccccgccggctggcggacgcgcgggaaagcggcgtcgcgaacagagccagattgagggcccgcgggtggagagagcgacgcccgaggggatggcggcagcgtcccggagcgcctctggctgggcgctactgctgctggtggcactttggcagcagcgcgcggccggctccggcgtcttccagctgcagctgcaggagttcatcaacgagcgcggcgtactggccagtgggcggccttgcgagcccggctgccggactttcttccgcgtctgccttaagcacttccaggcggtcgtctcgcccggaccctgcaccttcgggaccgtctccacgccggtattgggcaccaactccttcgctgtccgggacgacagtagcggcggggggcgcaaccctctccaactgcccttcaatttcacctggccgggtaccttctcgctcatcatcgaagcttggcacgcgccaggagacgacctgcggccagaggccttgccaccagatgcactcatcagcaagatcgccatccagggctccctagctgtgggtcagaactggttattggatgagcaaaccagcaccctcacaaggctgcgctactcttaccgggtcatctgcagtgacaactactatggagacaactgctcccgcctgtgcaagaagcgcaatgaccacttcggccactatgtgtgccagccagatggcaacttgtcctgcctgcccggttggactggggaatattgccaacagcctatctgtctttcgggctgtcatgaacagaatggctactgcagcaagccagcagagtgcctctgccgcccaggctggcagggccggctgtgtaacgaatgcatcccccacaatggctgtcgccacggcacctgcagcactccctggcaatgtacttgtgatgagggctggggaggcctgttttgtgaccaagatctcaactactgcacccaccactccccatgcaagaatggggcaacgtgctccaacagtgggcagcgaagctacacctgcacctgtcgcccaggctacactggtgtggactgtgagctggagctcagcgagtgtgacagcaacccctgtcgcaatggaggcagctgtaaggaccaggaggatggctaccactgcctgtgtcctccgggctactatggcctgcattgtgaacacagcaccttgagctgcgccgactccccctgcttcaatgggggctcctgccgggagcgcaaccagggggccaactatgcttgtgaatgtccccccaacttcaccggctccaactgcgagaagaaagtggacaggtgcaccagcaacccctgtgccaacgggggacagtgcctgaaccgaggtccaagccgcatgtgccgctgccgtcctggattcacgggcacctactgtgaactccacgtcagcgactgtgcccgtaacccttgcgcccacggtggcacttgccatgacctggagaatgggctcatgtgcacctgccctgccggcttctctggccgacgctgtgaggtgcggacatccatcgatgcctgtgcctcgagtccctgcttcaacagggccacctgctacaccgacctctccacagacacctttgtgtgcaactgcccttatggctttgtgggcagccgctgcgagttccccgtgggcttgccgcccagcttcccctgggtggccgtctcgctgggtgtggggctggcagtgctgctggtactgctgggcatggtggcagtggctgtgcggcagctgcggcttcgacggccggacgacggcagcagggaagccatgaacaacttgtcggacttccagaaggacaacctgattcctgccgcccagcttaaaaacacaaaccagaagaaggagctggaagtggactgtggcctggacaagtccaactgtggcaaacagcaaaaccacacattggactataatctggccccagggcccctggggcgggggaccatgccaggaaagtttccccacagtgacaagagcttaggagagaaggcgccactgcggttacacagtgaaaagccagagtgtcggatatcagcgatgtgctcccccagggactccatgtaccagtctgtgtgtttgatatcagaggagaggaatgaatgtgtcattgccacggaggtataaggcaggagcctacctggacatccctgctcagccccgcggctggaccttccttctgcattgtttacattgcatcctggatgggacgtttttcatatgcaacgtgctgctctcaggaggaggagggaatggcaggaaccggacagactgtgaacttgccaagagatgcaatacccttccacacctttgggtgtctgtctggcatcagattggcagctgcaccaaccagaggaacagaagagaagagagtggcagtagccccatggggcccggagctgctgtggcctccactggcatccgtgtttccaaaagtgcctttggcccagccaagggtgccaggcctaactggggcactcagggcagtgtgttggaaattccactgagggggaaatcaggtgctgcggccgc

SEQ ID NO: 2 - protein, 685 aa, Homo sapiens
MAAASRSASGWALLLLVALWQQRAAGSGVFQLQLQEFINERGVLASGRPCEPGCRTFFRVCLKHFQAVVSPGPCTFGTVSTPVLGTNSFAVRDDSSGGGRNPLQLPFNFTWPGTFSLIIEAWHAPGDDLRPEALPPDALISKIAIQGSLAVGQNWLLDEQTSTLTRLRYSYRVICSDNYYGDNCSRLCKKRNDHFGHYVCQPDGNLSCLPGWTGEYCQQPICLSGCHEQNGYCSKPAECLCRPGWQGRLCNECIPHNGCRHGTCSTPWQCTCDEGWGGLFCDQDLNYCTHHSPCKNGATCSNSGQRSYTCTCRPGYTGVDCELELSECDSNPCRNGGSCKDQEDGYHCLCPPGYYGLHCEHSTLSCADSPCFNGGSCRERNQGANYACECPPNFTGSNCEKKVDRCTSNPCANGGQCLNRGPSRMCRCRPGFTGTYCELHVSDCARNPCAHGGTCHDLENGLMCTCPAGFSGRRCEVRTSIDACASSPCFNRATCYTDLSTDTFVCNCPYGFVGSRCEFPVGLPPSFPWVAVSLGVGLAVLLVLLGMVAVAVRQLRLRRPDDGSREAMNNLSDFQKDNLIPAAQLKNTNQKKELEVDCGLDKSNCGKQQNHTLDYNLAPGPLGRGTMPGKFPHSDKSLGEKAPLRLHSEKPECRISAMCSPRDSMYQSVCLISEERNECVIATEV

SEQ ID NO: 3 - DNA, 2055 bp, Homo Sapiens
atggcggcagcgtcccggagcgcctctggctgggcgctactgctgctggtggcactttggcagcagcgcgcggccggctccggcgtcttccagctgcagctgcaggagttcatcaacgagcgcggcgtactggccagtgggcggccttgcgagcccggctgccggactttcttccgcgtctgccttaagcacttccaggcggtcgtctcgcccggaccctgcaccttcgggaccgtctccacgccggtattgggcaccaactccttcgctgtccgggacgacagtagcggcggggggcgcaaccctctccaactgcccttcaatttcacctggccgggtaccttctcgctcatcatcgaagcttggcacgcgccaggagacgacctgcggccagaggccttgccaccagatgcactcatcagcaagatcgccatccagggctccctagctgtgggtcagaactggttattggatgagcaaaccagcaccctcacaaggctgcgctactcttaccgggtcatctgcagtgacaactactatggagacaactgctcccgcctgtgcaagaagcgcaatgaccacttcggccactatgtgtgccagccagatggcaacttgtcctgcctgcccggttggactggggaatattgccaacagcctatctgtctttcgggctgtcatgaacagaatggctactgcagcaagccagcagagtgcctctgccgcccaggctggcagggccggctgtgtaacgaatgcatcccccacaatggctgtcgccacggcacctgcagcactccctggcaatgtacttgtgatgagggctggggaggcctgttttgtgaccaagatctcaactactgcacccaccactccccatgcaagaatggggcaacgtgctccaacagtgggcagcgaagctacacctgcacctgtcgcccaggctacactggtgtggactgtgagctggagctcagcgagtgtgacagcaacccctgtcgcaatggaggcagctgtaaggaccaggaggatggctaccactgcctgtgtcctccgggctactatggcctgcattgtgaacacagcaccttgagctgcgccgactccccctgcttcaatgggggctcctgccgggagcgcaaccagggggccaactatgcttgtgaatgtccccccaacttcaccggctccaactgcgagaagaaagtggacaggtgcaccagcaacccctgtgccaacgggggacagtgcctgaaccgaggtccaagccgcatgtgccgctgccgtcctggattcacgggcacctactgtgaactccacgtcagcgactgtgcccgtaacccttgcgcccacggtggcacttgccatgacctggagaatgggctcatgtgcacctgccctgccggcttctctggccgacgctgtgaggtgcggacatccatcgatgcctgtgcctcgagtccctgcttcaacagggccacctgctacaccgacctctccacagacacctttgtgtgcaactgcccttatggctttgtgggcagccgctgcgagttccccgtgggcttgccgcccagcttcccctgggtggccgtctcgctgggtgtggggctggcagtgctgctggtactgctgggcatggtggcagtggctgtgcggcagctgcggcttcgacggccggacgacggcagcagggaagccatgaacaacttgtcggacttccagaaggacaacctgattcctgccgcccagcttaaaaacacaaaccagaagaaggagctggaagtggactgtggcctggacaagtccaactgtggcaaacagcaaaaccacacattggactataatctggccccagggcccctggggcgggggaccatgccaggaaagtttccccacagtgacaagagcttaggagagaaggcgccactgcggttacacagtgaaaagccagagtgtcggatatcagcgatgtgctcccccagggactccatgtaccagtctgtgtgtttgatatcagaggagaggaatgaatgtgtcattgccacggaggta

SEQ ID NO: 4 - protein, 720 aa, Mus Musculus
MGRRSALALAVVSALLCQVWSSGVFELKLQEFVNKKGLLGNRNCCRGGSGPPCACRTFFRVCLKHQASVSPEPPCTYGSAVTPVLGVDSFSLPDGAGIDPAFSNPIRFPFGFTWPGTFSLIIEALHTDSPDDLATENPERLISRLTTQRHTVGEEWSQDLHSSGRTDLRYSYRFVCDEHYYGEGCSVFCRPRDDAFGHFTCGDRGEKMCDPGWKGQYCTDPICLPGCDDQHGYCDKPGECKCRVGWQGRYCDECIRYPGCLHGTCQQPWQCNCQEGWGGLFCNQDLNYCTHHKPCRNGATCTNTGQGSYTCSCRPGYTGANCELEVDECAPSPCKNGASCTDLEDSFSCTCPPGFYGKVCELSAMTCADGPCFNGGRCSDNPDGGYTCHCPLGFSGFNCEKKMDLCGSSPCSNGAKCVDLGNSYLCRCQAGFSGRYCEDNVDDCASSPCANGGTCRDSVNDFSCTCPPGYTGKNCSAPVSRCEHAPCHNGATCHQRGQRYMCECAQGYGGPNCQFLLPEPPPGPMVVDLSERHMESQGGPFPWVAVCAGVVLVLLLLLGCAAVVVCVRLKLQKHQPPPEPCGGETETMNNLANCQREKDVSVSIIGATQIKNTNKKADFHGDHGAKKSSFKVRYPTVDYNLVRDLKGDEATVRDTHSKRDTKCQSQSSAGEEKIAPTLRGGEIPDRKRPESVYSTSKDTKYQSVYVLSAEKDECVIATEV

SEQ ID NO: 5 - protein, 713 aa, Rattus Norvegicus
MGRRSALALAVVSALLCQVWSSGVFELKLQEFVNKKGLLGNRNCCRGGSGPPCACRTFFRVCLKHYQASVSPEPPCTYGSAVTAVLGVDSFSLPDGAGIDPAFSNPIRFPFGFTWPGTFSLIIEALHTDSPDDLATENPERLISRLTTQRHTVGEEWSQDLHSSGRTDLRYSYRFVCDEHYYGEGCSVFCRPRDDAFGHFTCGERGEKMCDPGWKGQYCTDPICLPGCDDQHGYCDKPGECKCRVGWQGRYCDECIRYPGCLHGTCQQPWQCNCQEGWGGLFCNQDLNYCTHHKPCRNGATCTNTGQGSYTCSCRPGYTGANCELEVDECAPSPCKNGGSCTDLEDSYSCTCPPGFYGKVCELSAMTCADGPCFNGGRCSDNPDGGYTCHCPAGFSGFNCEKKIDLCSSSPCSNGAKCVDLGNSYLCRCQTGFSGRYCEDNVDDCASSPCANGGTCRDSVNDFSCTCPPGYTGKNCSAPVSRCEHAPCHNGATCHQRGQRYMCECAQGYGGANCQFLLPEPPPDLIVAAQGGSFPWVAVCAGVVLVLLLLLGCAAVVVCVRLKLQKHQPPPDPCGGETETMNNLANCQREKDVSVSIIGATQIKNTNKKADFHGDHGADKSSFKARYPTVDYNLIRDLKGDEATVRDAHSKRDTKCQSQGSAGEEKSTSTLRGGEVPDRKRPESVYSTSKDTKYQSVYVLSAEKDECVIATEV

SEQ ID NO: 6 - protein, 157 aa, Homo Sapiens
ENSYSCTCPPGFYGKICELSAMTCADGPCFNGGRCSDSPDGGYSCRCPVCYSGFNCEKKIDYCSSSPCSNGAKCVDLGDAYLCRCQAGFSCRHCDDNVDDCASSPCANGGTCRDGVNDFSCTCPPGYTGRNCSAPASRCEHAPCHNGATCHERGHRY

SEQ ID NO: 7 - protein, 721 aa, Xenopus Laevis
MGQQRMLTLLVLSAVLCQISCSGLFELRLQEFVNKKGLLGNMNCCRPGSLASLQRCECKTFFRICLKHYQSNVSPEPPCTYGGAVTPVLGTNSFVVPESSNADPTFSNPIRFPFGFTWPGTFSLIIEAIHADSADDLNTENPERLISRLATQRHLTVGEQWSQDLHSSDRTELKYSYRFVCDEYYYGEGCSDYCRPRDDAFGHFSCGEKGENLCNPGWKGLYCTEPICLPGCDEHHGYCDKPGECKCRVGWQGRYCDECIRYPGCLHGTCQQPWQCNCQEGWGGLFCNQDLNYCTHHKPCENGATCTNTGQGSYTCSCRPGYTGSNCEIEVNECDANPCKNGGSCSDLENSYTCSCPPGFYGKNCELSAMTCADGPCFNGGRCADNPDGGYICPCPVGYSGFNCEKKIDYCSSNPCANGARCEDLGNSYICQCQEGFSGRNCDDNLDDCTSFPCQNGGTCQDGINDYSCTCPPGYIGKNCSMPITKCEHNPCHNGATCHERNNRYVCQCARGYGGNNCQFLLPEEKPVVVDLTEKYTEGQSGQFPWIAVCAGIVLVLMLLLGCAAVVVCVRVRVQKRRHQPEACRGESKTMNNLANCQREKDISVSFIGTTQIKNTNKKIDFLSESNNEKNGYKPRYPSVDYNLVHELKNEDSPKEERSKCEAKCSSNDSDSEDVNSVHSKRDSSERRRPDSAYSTSKDTKYQSVYVISDEKDECIIATEV

SEQ ID NO: 8 - protein, 729 aa, Gallus Gallus
MGGRFLLTLALLSALLCRCQVDGSGVFELKLQEFVNKKGLLSNRNCCRGGGPGGAGQQQCDCKTFFRVCLKHYQASVSPEPPCTYGSAITPVLGANSFSVPDGAGGADPAFSNPIRFPFGFTWPGTFSLIIEALHTDSPDDLTTENPERLISRLATQRHLAVGEEWSQDLHSSGRTDLKYSYRFVCDEHYYGEGCSVFCRPRDDRFGHFTCGERGEKVCNPGWKGQYCTEPICLPGCDEQHGFCDKPGECKCRVGWQGRYCDECIRYPGCLHGTCQQPWQCNCQEGWGGLFCNQDLNYCTHHKPCKNGATCTNTGQGSYTCSCRPGYTGSSCEIEINECDANPCKNGGSCTDLENSYSCTCPPGFYGKNCELSAMTCADGPCFNGGRCTDNPDGGYSCRCPLGYSGFNCEKKIDYCSSSPCANGAQACVDLGNSYICQCQAGFTGRHCDDNVDDCASFPCVNGGTCQDGVNDYSCTCPPGYNGKNCSTPVSRCEHNPCHNGATCHERSNRYVCECARGYGGLNCQFLLPEPPQGPVIVDFTEKYTEGQNSQFPWIAVCAGIILVLMLLLGCAAIVVCVRLKVQKRHHQPEACRSETETMNNLANCQREKDISISVIGATQIKNTNKKVDFHSDNSDKNGYKVRYPSVDYNLVHELKNEDSVKEEHGKCEAKCETYDSEAEEKSAVQLKSSDTSERKRPDSVYSTSKDTKYQSVYVISEEKDECIIATEV

SEQ ID NO: 9 - protein, 717 aa, Danio Rerio
MGRLMIAVLLCVMISQGFCSGVFELKLQEFLNKKGVTGNANCCKGSAAEGHQCECKTFFRICLKHYQANVSPDPPCTYGGAVTPVLGSNSFQVPESFPDSSFTNPIPFAFGFTWPGTFSLIIEALHTDSTDDLSTENPDRLISRMTTQRHLTVGEEWSQDLQVGGRTELKYSYRFVCDEHYYGEGCSVFCRPRDDTFGHFTCGERGEIICNSGWKGQYCTEPICLPGCDEDHGFCDKPGECKCRVGFSGKYCDDCIRYPGCLHGTCQQPWQCNCQEGWGGLFCNQDLNYCTHHKPCQNGATCTNTGQGSYTCSCRPGFTGDSCEIEVNECSGSPCRNGGSCTDLENTYSCTCPPGFYGRNCELSAMTCADGPCFNGGHCADNPEGGYFCQCPMGYAGFNCEKKIDHCSSNPCSNDAQCLDLVDSYLCQCPEGFTGTHCEDNIDECATYPCQNGGTCQDGLSDYTCTCPPGYTGKNCTSAVNKCLHNPCHNGATCHEMDNRYVCACIPGYGGRNCQFLLPENPQGQAIVEGADKRYSYEEDDGGFPWTAVCAGIILVLLVLIGGSVFVIYIRLKLQQRSQQIDSHSEIETMNNLTNNRSREKDLSVSIIGATQVKNINKKVDFQSDGDKNGFKSRYSLVDYNLVHELKQEDLGKEDSERSEATKCEPLDSDSEEKHRNHLKSDSSERKRTESLCKDTKYQSVFVLSEEKDECIIATEV

SEQ ID NO: 10 - protein, 642 aa, Xenopus Laevis
MASPLLLVYVAATLCLPLVYPAGVFELKIHSFSTPRPACAAGKSCNIFFRVCLKHAQPVVSPDPPCTFGSAVSDILPSDSKAITDSSPIRVPFHFKWPGIFSLIIESWTTNSAEQSTENPDNLLSRLATRRRLSIGEDWSQDIHLGQQSELRYSYHVSCDEHYYGDSCSDYCRPRDDNFGHYTCDEQGNRLCMSGWKGEYCAEPICLPGCSESHGFCELPGECKCRMGWQGELCDECLRYPGCQHGSCSQPWECICQEGWGGLFCNQDLNYCTNHQPCRNGASCINIGQGSYSCSCRAGFTGTNCEIDINECASNPCKNGGSCNDLENDYECVCPRGFYGKNCDISAMTCEDGPCFNGGTCIEKSSGVGYVCRCPPNYHGSNCEKKIDRCTNSPCLNGGQCLDMGRNVLCKCRPGPSGPRCELNIDDCASSPCANGGTCVDAVNSYTCSCTLGYGGKDCTLRVDACSSKPCKNGGTCYTKFTGNVCQCPTGFMGTSCEFRVHDPTPASHRADSSNTLTMVVCLGLLTFFLLGCGVFMVMRGMRRGHFNEKGRVNNDLEPKNNLIEKEPHFKMPNPDYLREKSSSKQKLLQGSESEEERSGRRTDRKPDTKQCNPTSRYPEDGAYHPIYILPEPEQCIFATEV

SEQ ID NO: 11 - protein, 830 aa, Drosophila Melanogaster
MHWIKCLLTAFICFTVIVQVHSSGSFELRLKYFSNDHGRDNEGRCCSGESDGATGKCLGSCKTRFRVCLKHYQATIDTTSQCTYGDVITPILGENSVNLTDAQRFQNKGFTNPIQFPFSFSWPGTFSLIVEAWHDTNNSGNARTNKLLIQRLLVQQVLEVSSEWKTNKSESQYTSLEYDFRVTCDLNYYGSGCAKFCRPRDDSFGHSTCSETGEIICLTGWQGDYCHIPKCAKGCEHGHCDKPNQCVCQLGWKGALCNECVLEPNCIHGTCNKPWTCICNEGWGGLYCNQDLNYCTNHRPCKNGGTCFNTGEGLYTCKCAPGYSGDDENEIYSCDADVNPCQNGGTCIDEPHTKTGKCHCANGWSGKMCEEKVLTCSDKPCHQGICRNVRPGLGSKGQGYQCECPIGYSGPNCDLQLDNCSPNPCINGGSCQPSGKCICPAGFSGTRCETNIDDCLGHQCENGGTCIDMVNQYRCQCVPGFHGTHCSSKVDLCLIRPCANGGTCLNLNNDYQCTCRAGFTGKDCSVDIDECSSGPCHNGGTCMNRVNSFECVCANGFRGKQCDEESYDSVTFDAHQYGATTQARADGLTNAQVVLIAVFSVAMPLVAVIAACVVFCMKRKRKRAQEKDDAEARKQNEQNAVATMHHNGSGVGVALASASLGGKTGSNSGLTFDGGNPNIIKNTWDKSVNNICASAAAAAAAAAAADECLMYGGYVASVADNNNANSDFCVAPLQRAKSQKQLNTDPTLMHRGSPAGSSAKGASGGGPGAAEGKRISVLGEGSYCSQRWPSLAAAGVAGACSSQLMAAASAAGTDGTAQQQRSVVCGTPHM

SEQ ID NO: 12 - DNA, 20 bp, Homo Sapiens
agcgcctctggctgggcgct

SEQ ID NO: 13 - DNA, 20 bp, Homo Sapiens
cggccagaggccttgccacc

SEQ ID NO: 14 - DNA, 20 bp, Homo Sapiens
ttgcgctcccggctggagcc

SEQ ID NO: 15 - DNA, 20 bp, Homo Sapiens
atgcggcttggacctcggtt

SEQ ID NO: 16 - DNA, 21 bp, Homo Sapiens
tgccgccatccctcggggcgt

SEQ ID NO: 17 - DNA, 20 bp, Homo Sapiens
ggacgctgccgccatcccct

SEQ ID NO: 18 - DNA, 28 bp, Homo Sapiens
ggacgctgccgccatcccctcggggcgt

SEQ ID NO: 19 - DNA, 20 bp, Homo Sapiens
tcaatctggctctgttcgcg

SEQ ID NO: 20 - DNA, 26 bp, Homo Sapiens
cgctctctccacccgcgggccctcaa

SEQ ID NO: 21 - DNA, 171 bp, Homo Sapiens
  misc_feature (1)..(171): n = A,T,C or G
gcccaggcngaccctggtgtggactgtgagctggagctcagcgagtgtgacagcaacccctgtcgcantggaggcagctgtaaggaccangaggatggctaccactgcctgtgtcctccgggctactacggcntgcatcgtgaacacngcacctcttagctgngccgactc

SEQ ID NO: 22 - DNA, 20 bp, Homo Sapiens
ctcttctgttcctctggttg

SEQ ID NO: 23 - protein, 45 aa, Artificial Sequence
  DSL domain consensus sequence
  VARIANT (1)..(2): Xaa = any amino acid
  VARIANT (4)..(6): Xaa = any amino acid
  VARIANT (8)..(8): Xaa = Phe or Tyr
  VARIANT (10)..(11): Xaa = any amino acid
  VARIANT (13)..(15): Xaa = any amino acid
  VARIANT (17)..(17): Xaa = His or Arg
  VARIANT (18)..(18): Xaa = any amino acid
  VARIANT (20)..(20): Xaa = any amino acid
  VARIANT (22)..(22): Xaa = any amino acid
  VARIANT (25)..(25): Xaa = His or Arg
  VARIANT (26)..(27): Xaa = any amino acid
  VARIANT (29)..(31): Xaa = any amino acid
  VARIANT (33)..(35): Xaa = any amino acid
  VARIANT (37)..(38): Xaa = any amino acid
  VARIANT (41)..(41): Xaa = any amino acid
  VARIANT (43)..(43): Xaa = any amino acid
XXCXXXYXGXXCXXXCXXRXDXFGXXXCXXXGXXXCXXGWXGXYC

SEQ ID NO: 24 - DNA, 3133 bp, Mus Musculus
  CDS (39)..(2099)
gtcgacccacgcgtccggtggagaggacaccccaagggatgacgcctgcgtcccggagcgcctgtcgctgggcgctactgctgctggcggtactgtggccgcagcagcgcgctgcgggctccggcatcttccagctgcggctgcaggagttcgtcaaccagcgcggtatgctggccaatgggcagtcctgcgaaccgggctgccggactttcttccgcatctgccttaagcacttccaggcaaccttctccgagggaccctgcacctttggcaatgtctccacgccggtattgggcaccaactccttcgtcgtcagggacaagaatagcggcagtggtcgcaaccctctgcagttgcccttcaatttcacctggccgggaaccttctcactcaacatccaagcttggcacacaccgggagacgacctgcggccagagacttcgccaggaaactctctcatcagccaaatcatcatccaaggctctcttgctgtgggtaagatttggcgaacagacgagcaaaatgacaccctcaccagactgagctactcttaccgggtcatctgcagtgacaactactatggagagagctgttctcgcctatgcaagaagcgcgatgaccacttcggacattatgagtgccagccagatggcagcctgtcctgcctgccgggctggactgggaagtactgtgaccagcctatatgtctttctggctgtcatgagcagaatggttactgcagcaagccagatgagtgcatctgccgtccaggttggcagggtcgcctgtgcaatgaatgtatcccccacaatggctgtcgtcatggcacctgcagcatcccctggcagtgtgcctgcgatgagggatggggaggtctgttttgtgaccaagatctcaactactgtactcaccactctccgtgcaagaatggatcaacgtgttccaacagtgggccaaagggttatacctgcacctgtctcccaggctacactggtgagcactgtgagctgggactcagcaagtgtgccagcaacccctgtcgaaatggtggcagctgtaaggaccaggagaatagctaccactgcctgtgtcccccaggctactatggccagcactgtgagcatagtaccttgacctgcgcggactcaccctgcttcaatgggggctcttgccgggagcgcaaccaggggtccagttatgcctgcgaatgcccccccaactttaccggctctaactgtgagaagaaagtagacaggtgtaccagcaacccgtgtgccaatggaggccagtgccagaacagaggtccaagccgaacctgccgctgccggcctggattcacaggcacccactgtgaactgcacatcagcgattgtgcccgaagtccctgtgcccacgggggcacttgccacgatctggagaatgggcctgtgtgcacctgccccgctggcttctctggaaggcgctgcgaggtgcggataacccacgatgcctgtgcctccggaccctgcttcaatggggccacctgctacactggcctctccccaaacaacttcgtctgcaactgtccttatggctttgtgggcagccgctgcgagtttcccgtgggcttgccacccagcttcccctgggtagctgtctcgctgggcgtggggctagtggtactgctggtgctcctggtcatggtggtagtggctgtgcggcagctgcggcttcggaggcccgatgacgagagcagggaagccatgaacaatctgtcagacttccagaaggacaacctaatccctgccgcccagctcaaaaacacaaaccagaagaaggagctggaagtggactgtggtctggacaagtccaattgtggcaaactgcagaaccacacattggactacaatctagccccgggactcctaggacggggcggcatgcctgggaagtatcctcacagtgacaagagcttaggagagaaggtgccacttcggttacacagtgagaagccagagtgtcgaatatcagccatttgctctcccagggactctatgtaccaatcagtgtgtttgatatcagaagagaggaacgagtgtgtgattgccacagaggtataaggcaggagcctactcagacacccagctccggcccagcagctgggccttccttctgcattgtttacattgcatcctgtatgggacatctttagtatgcacagtgctgctctgcggaggaggaggaaatggcatgaactgaacagactgtgaacccgccaagagtcgcaccggctctgcacacctccaggagtctgcctggcttcagatgggcagccccgccaagggaacagagttgaggagttagaggagcatcagttgagctgatatctaaggtgcctctcgaacttggacttgctctgccaacagtggtcatcatggagctcttgactgttctccagagagtggcagtggccctagtgggtcttggcgctgctgtagctcctgtgggcatctgtatttccaaagtgcctttgcccagactccatcctcacagctgggcccaaatgagaaagcagagaggaggcttgcaaaggataggcctcccgcaggcagaacagccttggagtttggcattaagcaggagctactctgcaggtgaggaaagcccgaggaggggacacgtgtgactcctgcctccaaccccagtaggtggagtgccacctgtagcctctaggcaagagttggtccttcccctggtcctggtgcctctgggctcatgtgaacagatgggcttagggcacgccccttttgccagccaggggtacaggcctcactggggagctcagggccttcatgctaaactcccaataagggagatggggggaagggggctgtggcctaggcccttccctccctcacacccatttctgggcccttgagcctgggctccaccagtgcccactgctgccccgagaccaaccttgaagccgatcttcaaaaatcaataatatgaggttttgttttgtagtttattttggaatctagtattttgataatttaagaatcagaagcactggcctttctacattttataacattattttgtatataatgtgtatttataatatgaaaaaaaaaaaaaaaagggcggccgc

SEQ ID NO: 25 - protein, 686 aa, Mus Musculus
MTPASRSACRWALLLLAVLWPQQRAAGSGIFQLRLQEFVNQRGMLANGQSCEPGCRTFFRICLKHFQATFSEGPCTFGNVSTPVLGTNSFVVRDKNSGSGRNPLQLPFNFTWPGTFSLNIQAWHTPGDDLRPETSPGNSLISQIIIQGSLAVGKIWRTDEQNDTLTRLSYSYRVICSDNYYGESCSRLCKKRDDHFGHYECQPDGSLSCLPGWTGKYCDQPICLSGCHEQNGYCSKPDECICRPGWQGRLCNECIPHNGCRHGTCSIPWQCACDEGWGGLFCDQDLNYCTHHSPCKNGSTCSNSGPKGYTCTCLPGYTGEHCELGLSKCASNPCRNGGSCKDQENSYHCLCPPGYYGQHCEHSTLTCADSPCFNGGSCRERNQGSSYACECPPNFTGSNCEKKVDRCTSNPCANGGQCQNRGPSRTCRCRPGFTGTHCELHISDCARSPCAHGGTCHDLENGPVCTCPAGFSGRRCEVRITHDACASGPCFNGATCYTGLSPNNFVCNCPYGFVGSRCEFPVGLPPSFPWVAVSLGVGLVVLLVLLVMVVVAVRQLRLRRPDDESREAMNNLSDFQKDNLIPAAQLKNTNQKKELEVDCGLDKSNCGKLQNHTLDYNLAPGLLGRGGMPGKYPHSDKSLGEKVPLRLHSEKPECRISAICSPRDSMYQSVCLISEERNECVIATEV

SEQ ID NO: 26 - DNA, 2058 bp, Mus Musculus
atgacgcctgcgtcccggagcgcctgtcgctgggcgctactgctgctggcggtactgtggccgcagcagcgcgctgcgggctccggcatcttccagctgcggctgcaggagttcgtcaaccagcgcggtatgctggccaatgggcagtcctgcgaaccgggctgccggactttcttccgcatctgccttaagcacttccaggcaaccttctccgagggaccctgcacctttggcaatgtctccacgccggtattgggcaccaactccttcgtcgtcagggacaagaatagcggcagtggtcgcaaccctctgcagttgcccttcaatttcacctggccgggaaccttctcactcaacatccaagcttggcacacaccgggagacgacctgcggccagagacttcgccaggaaactctctcatcagccaaatcatcatccaaggctctcttgctgtgggtaagatttggcgaacagacgagcaaaatgacaccctcaccagactgagctactcttaccgggtcatctgcagtgacaactactatggagagagctgttctcgcctatgcaagaagcgcgatgaccacttcggacattatgagtgccagccagatggcagcctgtcctgcctgccgggctggactgggaagtactgtgaccagcctatatgtctttctggctgtcatgagcagaatggttactgcagcaagccagatgagtgcatctgccgtccaggttggcagggtcgcctgtgcaatgaatgtatcccccacaatggctgtcgtcatggcacctgcagcatcccctggcagtgtgcctgcgatgagggatggggaggtctgttttgtgaccaagatctcaactactgtactcaccactctccgtgcaagaatggatcaacgtgttccaacagtgggccaaagggttatacctgcacctgtctcccaggctacactggtgagcactgtgagctgggactcagcaagtgtgccagcaacccctgtcgaaatggtggcagctgtaaggaccaggagaatagctaccactgcctgtgtcccccaggctactatggccagcactgtgagcatagtaccttgacctgcgcggactcaccctgcttcaatgggggctcttgccgggagcgcaaccaggggtccagttatgcctgcgaatgcccccccaactttaccggctctaactgtgagaagaaagtagacaggtgtaccagcaacccgtgtgccaatggaggccagtgccagaacagaggtccaagccgaacctgccgctgccggcctggattcacaggcacccactgtgaactgcacatcagcgattgtgcccgaagtccctgtgcccacgggggcacttgccacgatctggagaatgggcctgtgtgcacctgccccgctggcttctctggaaggcgctgcgaggtgcggataacccacgatgcctgtgcctccggaccctgcttcaatggggccacctgctacactggcctctccccaaacaacttcgtctgcaactgtccttatggctttgtgggcagccgctgcgagtttcccgtgggcttgccacccagcttcccctgggtagctgtctcgctgggcgtggggctagtggtactgctggtgctcctggtcatggtggtagtggctgtgcggcagctgcggcttcggaggcccgatgacgagagcagggaagccatgaacaatctgtcagacttccagaaggacaacctaatccctgccgcccagctcaaaaacacaaaccagaagaaggagctggaagtggactgtggtctggacaagtccaattgtggcaaactgcagaaccacacattggactacaatctagccccgggactcctaggacggggcggcatgcctgggaagtatcctcacagtgacaagagcttaggagagaaggtgccacttcggttacacagtgagaagccagagtgtcgaatatcagccatttgctctcccagggactctatgtaccaatcagtgtgtttgatatcagaagagaggaacgagtgtgtgattgccacagaggta

SEQ ID NO: 27 - DNA, 2800 bp, Homo Sapiens
  CDS (338)..(2395)
gtcgacccacgcgtccggctgcgcgcaggccgggaacacgaggccaagagccgcagccccagccgccttggtgcagcgtacaccggcactagcccgcttgcagccccaggattagacagaagacgcgtcctcggcgcggtcgccgcccagccgtagtcacctggattacctacagcggcagctgcagcggagccagcgagaaggccaaaggggagcagcgtcccgagaggagcgcctcttttcagggaccccgccggctggcggacgcgcgggaaagcggcgtcgcgaacagagccagattgagggcccgcgggtggagagagcgacgcccgaggggatggcggcagcgtcccggagcgcctctggctgggcgctactgctgctggtggcactttggcagcagcgcgcggccggctccggcgtcttccagctgcagctgcaggagttcatcaaccagcgcggcgtactggccagtgggcggccttgcgagcccggctgccggactttcttccgcgtctgccttaagcacttccaggcggtcgtctcgcccggaccctgcaccttcgggaccgtctccacgccggtattgggcaccaactccttcgctgtccgggacgacagtagcggcggggggcgcaaccctctccaactgcccttcaatttcacctggccgggtaccttctcgctcatcatcgaagcttggcacgcgccaggagacgacctgcggccagaggccttgccaccagatgcactcatcagcaagatcgccatccagggctccctagctgtgggtcagaactggttattggatgagcaaaccagcaccctcacaaggctgcgctactcttaccgggtcatctgcagtgacaactactatggagacaactgctcccgcctgtgcaagaagcgcaatgaccacttcggccactatgtgtgccagccagatggcaacttgtcctgcctgcccggttggactggggaatattgccaacagcctatctgtctttcgggctgtcatgaacagaatggctactgcagcaagccagcagagtgcctctgccgcccaggctggcagggccggctgtgtaacgaatgcatcccccacaatggctgtcgccacggcacctgcagcactccctggcaatgtacttgtgatgagggctggggaggcctgttttgtgaccaagatctcaactactgcacccaccactccccatgcaagaatggggcaacgtgctccaacagtgggcagcgaagctacacctgcacctgtcgcccaggctacactggtgtggactgtgagctggagctcagcgagtgtgacagcaacccctgtcgcaatggaggcagctgtaaggaccaggaggatggctaccactgcctgtgtcctccgggctactatggcctgcattgtgaacacagcaccttgagctgcgccgactccccctgcttcaatgggggctcctgccgggagcgcaaccagggggccaactatgcttgtgaatgtccccccaacttcaccggctccaactgcgagaagaaagtggacaggtgcaccagcaacccctgtgccaacgggggacagtgcctgaaccgaggtccaagccgcatgtgccgctgccgtcctggattcacgggcacctactgtgaactccacgtcagcgactgtgcccgtaacccttgcgcccacggtggcacttgccatgacctggagaatgggctcatgtgcacctgccctgccggcttctctggccgacgctgtgaggtgcggacatccatcgatgcctgtgcctcgagtccctgcttcaacagggccacctgctacaccgacctctccacagacacctttgtgtgcaactgcccttatggctttgtgggcagccgctgcgagttccccgtgggcttgccgcccagcttcccctgggtggccgtctcgctgggtgtggggctggcagtgctgctggtactgctgggcatggtggcagtggctgtgcggcagctgcggcttcgacggccggacgacggcagcagggaagccatgaacaacttgtcggacttccagaaggacaacctgattcctgccgcccagcttaaaaacacaaaccagaagaaggagctggaagtggactgtggcctggacaagtccaactgtggcaaacagcaaaaccacacattggactataatctggccccagggcccctggggcgggggaccatgccaggaaagtttccccacagtgacaagagcttaggagagaaggcgccactgcggttacacagtgaaaagccagagtgtcggatatcagcgatgtgctcccccagggactccatgtaccagtctgtgtgtttgatatcagaggagaggaatgaatgtgtcattgccacggaggtataaggcaggagcctacctggacatccctgctcagccccgcggctggaccttccttctgcattgtttacattgcatcctggatgggacgtttttcatatgcaacgtgctgctctcaggaggaggagggaatggcaggaaccggacagactgtgaacttgccaagagatgcaatacccttccacacctttgggtgtctgtctggcatcagattggcagctgcaccaaccagaggaacagaagagaagagagtggcagtagccccatggggcccggagctgctgtggcctccactggcatccgtgtttccaaaagtgcctttggcccagccaagggtgccaggcctaactggggcactcagggcagtgtgttggaaattccactgagggggaaatcaggtgctgcggccgc

SEQ ID NO: 28 - protein, 685 aa, Homo Sapiens
MAAASRSASGWALLLLVALWQQRAAGSGVFQLQLQEFINQRGVLASGRPCEPGCRTFFRVCLKHFQAVVSPGPCTFGTVSTPVLGTNSFAVRDDSSGGGRNPLQLPFNFTWPGTFSLIIEAWHAPGDDLRPEALPPDALISKIAIQGSLAVGQNWLLDEQTSTLTRLRYSYRVICSDNYYGDNCSRLCKKRNDHFGHYVCQPDGNLSCLPGWTGEYCQQPICLSGCHEQNGYCSKPAECLCRPGWQGRLCNECIPHNGCRHGTCSTPWQCTCDEGWGGLFCDQDLNYCTHHSPCKNGATCSNSGQRSYTCTCRPGYTGVDCELELSECDSNPCRNGGSCKDQEDGYHCLCPPGYYGLHCEHSTLSCADSPCFNGGSCRERNQGANYACECPPNFTGSNCEKKVDRCTSNPCANGGQCLNRGPSRMCRCRPGFTGTYCELHVSDCARNPCAHGGTCHDLENGLMCTCPAGFSGRRCEVRTSIDACASSPCFNRATCYTDLSTDTFVCNCPYGFVGSRCEFPVGLPPSFPWVAVSLGVGLAVLLVLLGMVAVAVRQLRLRRPDDGSREAMNNLSDFQKDNLIPAAQLKNTNQKKELEVDCGLDKSNCGKQQNHTLDYNLAPGPLGRGTMPGKFPHSDKSLGEKAPLRLHSEKPECRISAMCSPRDSMYQSVCLISEERNECVIATEV

SEQ ID NO: 29 - DNA, 2800 bp, Homo Sapiens
  CDS (338)..(457)
gtcgacccacgcgtccggctgcgcgcaggccgggaacacgaggccaagagccgcagccccagccgccttggtgcagcgtacaccggcactagcccgcttgcagccccaggattagacagaagacgcgtcctcggcgcggtcgccgcccagccgtagtcacctggattacctacagcggcagctgcagcggagccagcgagaaggccaaaggggagcagcgtcccgagaggagcgcctcttttcagggaccccgccggctggcggacgcgcgggaaagcggcgtcgcgaacagagccagattgagggcccgcgggtggagagagcgacgcccgaggggatggcggcagcgtcccggagcgcctctggctgggcgctactgctgctggtggcactttggcagcagcgcgcggccggctccggcgtcttccagctgcagctgcaggagttcatcaactagcgcggcgtactggccagtgggcggccttgcgagcccggctgccggactttcttccgcgtctgccttaagcacttccaggcggtcgtctcgcccggaccctgcaccttcgggaccgtctccacgccggtattgggcaccaactccttcgctgtccgggacgacagtagcggcggggggcgcaaccctctccaactgcccttcaatttcacctggccgggtaccttctcgctcatcatcgaagcttggcacgcgccaggagacgacctgcggccagaggccttgccaccagatgcactcatcagcaagatcgccatccagggctccctagctgtgggtcagaactggttattggatgagcaaaccagcaccctcacaaggctgcgctactcttaccgggtcatctgcagtgacaactactatggagacaactgctcccgcctgtgcaagaagcgcaatgaccacttcggccactatgtgtgccagccagatggcaacttgtcctgcctgcccggttggactggggaatattgccaacagcctatctgtctttcgggctgtcatgaacagaatggctactgcagcaagccagcagagtgcctctgccgcccaggctggcagggccggctgtgtaacgaatgcatcccccacaatggctgtcgccacggcacctgcagcactccctggcaatgtacttgtgatgagggctggggaggcctgttttgtgaccaagatctcaactactgcacccaccactccccatgcaagaatggggcaacgtgctccaacagtgggcagcgaagctacacctgcacctgtcgcccaggctacactggtgtggactgtgagctggagctcagcgagtgtgacagcaacccctgtcgcaatggaggcagctgtaaggaccaggaggatggctaccactgcctgtgtcctccgggctactatggcctgcattgtgaacacagcaccttgagctgcgccgactccccctgcttcaatgggggctcctgccgggagcgcaaccagggggccaactatgcttgtgaatgtccccccaacttcaccggctccaactgcgagaagaaagtggacaggtgcaccagcaacccctgtgccaacgggggacagtgcctgaaccgaggtccaagccgcatgtgccgctgccgtcctggattcacgggcacctactgtgaactccacgtcagcgactgtgcccgtaacccttgcgcccacggtggcacttgccatgacctggagaatgggctcatgtgcacctgccctgccggcttctctggccgacgctgtgaggtgcggacatccatcgatgcctgtgcctcgagtccctgcttcaacagggccacctgctacaccgacctctccacagacacctttgtgtgcaactgcccttatggctttgtgggcagccgctgcgagttccccgtgggcttgccgcccagcttcccctgggtggccgtctcgctgggtgtggggctggcagtgctgctggtactgctgggcatggtggcagtggctgtgcggcagctgcggcttcgacggccggacgacggcagcagggaagccatgaacaacttgtcggacttccagaaggacaacctgattcctgccgcccagcttaaaaacacaaaccagaagaaggagctggaagtggactgtggcctggacaagtccaactgtggcaaacagcaaaaccacacattggactataatctggccccagggcccctggggcgggggaccatgccaggaaagtttccccacagtgacaagagcttaggagagaaggcgccactgcggttacacagtgaaaagccagagtgtcggatatcagcgatgtgctcccccagggactccatgtaccagtctgtgtgtttgatatcagaggagaggaatgaatgtgtcattgccacggaggtataaggcaggagcctacctggacatccctgctcagccccgcggctggaccttccttctgcattgtttacattgcatcctggatgggacgtttttcatatgcaacgtgctgctctcaggaggaggagggaatggcaggaaccggacagactgtgaacttgccaagagatgcaatacccttccacacctttgggtgtctgtctggcatcagattggcagctgcaccaaccagaggaacagaagagaagagagtggcagtagccccatggggcccggagctgctgtggcctccactggcatccgtgtttccaaaagtgcctttggcccagccaagggtgccaggcctaactggggcactcagggcagtgtgttggaaattccactgagggggaaatcaggtgctgcggccgc

SEQ ID NO: 30 - protein, 39 aa, Homo Sapiens
MAAASRSASGWALLLLVALWQQRAAGSGVFQLQLQEFIN

SEQ ID NO: 31 - DNA, 2800 bp, Homo Sapiens
  CDS (338)..(2395)
gtcgacccacgcgtccggctgcgcgcaggccgggaacacgaggccaagagccgcagccccagccgccttggtgcagcgtacaccggcactagcccgcttgcagccccaggattagacagaagacgcgtcctcggcgcggtcgccgcccagccgtagtcacctggattacctacagcggcagctgcagcggagccagcgagaaggccaaaggggagcagcgtcccgagaggagcgcctcttttcagggaccccgccggctggcggacgcgcgggaaagcggcgtcgcgaacagagccagattgagggcccgcgggtggagagagcgacgcccgaggggatggcggcagcgtcccggagcgcctctggctgggcgctactgctgctggtggcactttggcagcagcgcgcggccggctccggcgtcttccagctgcagctgcaggagttcatcaacaagcgcggcgtactggccagtgggcggccttgcgagcccggctgccggactttcttccgcgtctgccttaagcacttccaggcggtcgtctcgcccggaccctgcaccttcgggaccgtctccacgccggtattgggcaccaactccttcgctgtccgggacgacagtagcggcggggggcgcaaccctctccaactgcccttcaatttcacctggccgggtaccttctcgctcatcatcgaagcttggcacgcgccaggagacgacctgcggccagaggccttgccaccagatgcactcatcagcaagatcgccatccagggctccctagctgtgggtcagaactggttattggatgagcaaaccagcaccctcacaaggctgcgctactcttaccgggtcatctgcagtgacaactactatggagacaactgctcccgcctgtgcaagaagcgcaatgaccacttcggccactatgtgtgccagccagatggcaacttgtcctgcctgcccggttggactggggaatattgccaacagcctatctgtctttcgggctgtcatgaacagaatggctactgcagcaagccagcagagtgcctctgccgcccaggctggcagggccggctgtgtaacgaatgcatcccccacaatggctgtcgccacggcacctgcagcactccctggcaatgtacttgtgatgagggctggggaggcctgttttgtgaccaagatctcaactactgcacccaccactccccatgcaagaatggggcaacgtgctccaacagtgggcagcgaagctacacctgcacctgtcgcccaggctacactggtgtggactgtgagctggagctcagcgagtgtgacagcaacccctgtcgcaatggaggcagctgtaaggaccaggaggatggctaccactgcctgtgtcctccgggctactatggcctgcattgtgaacacagcaccttgagctgcgccgactccccctgcttcaatgggggctcctgccgggagcgcaaccagggggccaactatgcttgtgaatgtccccccaacttcaccggctccaactgcgagaagaaagtggacaggtgcaccagcaacccctgtgccaacgggggacagtgcctgaaccgaggtccaagccgcatgtgccgctgccgtcctggattcacgggcacctactgtgaactccacgtcagcgactgtgcccgtaacccttgcgcccacggtggcacttgccatgacctggagaatgggctcatgtgcacctgccctgccggcttctctggccgacgctgtgaggtgcggacatccatcgatgcctgtgcctcgagtccctgcttcaacagggccacctgctacaccgacctctccacagacacctttgtgtgcaactgcccttatggctttgtgggcagccgctgcgagttccccgtgggcttgccgcccagcttcccctgggtggccgtctcgctgggtgtggggctggcagtgctgctggtactgctgggcatggtggcagtggctgtgcggcagctgcggcttcgacggccggacgacggcagcagggaagccatgaacaacttgtcggacttccagaaggacaacctgattcctgccgcccagcttaaaaacacaaaccagaagaaggagctggaagtggactgtggcctggacaagtccaactgtggcaaacagcaaaaccacacattggactataatctggccccagggcccctggggcgggggaccatgccaggaaagtttccccacagtgacaagagcttaggagagaaggcgccactgcggttacacagtgaaaagccagagtgtcggatatcagcgatgtgctcccccagggactccatgtaccagtctgtgtgtttgatatcagaggagaggaatgaatgtgtcattgccacggaggtataaggcaggagcctacctggacatccctgctcagccccgcggctggaccttccttctgcattgtttacattgcatcctggatgggacgtttttcatatgcaacgtgctgctctcaggaggaggagggaatggcaggaaccggacagactgtgaacttgccaagagatgcaatacccttccacacctttgggtgtctgtctggcatcagattggcagctgcaccaaccagaggaacagaagagaagagagtggcagtagccccatggggcccggagctgctgtggcctccactggcatccgtgtttccaaaagtgcctttggcccagccaagggtgccaggcctaactggggcactcagggcagtgtgttggaaattccactgagggggaaatcaggtgctgcggccgc

SEQ ID NO: 32 - protein, 685 aa, Homo Sapiens
MAAASRSASGWALLLLVALWQQRAAGSGVFQLQLQEFINKRGVLASGRPCEPGCRTFFRVCLKHFQAVVSPGPCTFGTVSTPVLGTNSFAVRDDSSGGGRNPLQLPFNFTWPGTFSLIIEAWHAPGDDLRPEALPPDALISKIAIQGSLAVGQNWLLDEQTSTLTRLRYSYRVICSDNYYGDNCSRLCKKRNDHFGHYVCQPDGNLSCLPGWTGEYCQQPICLSGCHEQNGYCSKPAECLCRPGWQGRLCNECIPHNGCRHGTCSTPWQCTCDEGWGGLFCDQDLNYCTHHSPCKNGATCSNSGQRSYTCTCRPGYTGVDCELELSECDSNPCRNGGSCKDQEDGYHCLCPPGYYGLHCEHSTLSCADSPCFNGGSCRERNQGANYACECPPNFTGSNCEKKVDRCTSNPCANGGQCLNRGPSRMCRCRPGFTGTYCELHVSDCARNPCAHGGTCHDLENGLMCTCPAGFSGRRCEVRTSIDACASSPCFNRATCYTDLSTDTFVCNCPYGFVGSRCEFPVGLPPSFPWVAVSLGVGLAVLLVLLGMVAVAVRQLRLRRPDDGSREAMNNLSDFQKDNLIPAAQLKNTNQKKELEVDCGLDKSNCGKQQNHTLDYNLAPGPLGRGTMPGKFPHSDKSLGEKAPLRLHSEKPECRISAMCSPRDSMYQSVCLISEERNECVIATEV

SEQ ID NO: 33 - DNA, 2800 bp, Homo Sapiens
  CDS (338)..(2395)
gtcgacccacgcgtccggctgcgcgcaggccgggaacacgaggccaagagccgcagccccagccgccttggtgcagcgtacaccggcactagcccgcttgcagccccaggattagacagaagacgcgtcctcggcgcggtcgccgcccagccgtagtcacctggattacctacagcggcagctgcagcggagccagcgagaaggccaaaggggagcagcgtcccgagaggagcgcctcttttcagggaccccgccggctggcggacgcgcgggaaagcggcgtcgcgaacagagccagattgagggcccgcgggtggagagagcgacgcccgaggggatggcggcagcgtcccggagcgcctctggctgggcgctactgctgctggtggcactttggcagcagcgcgcggccggctccggcgtcttccagctgcagctgcaggagttcatcaacgagcgcggcgtactggccagtgggcggccttgcgagcccggctgccggactttcttccgcgtctgccttaagcacttccaggcggtcgtctcgcccggaccctgcaccttcgggaccgtctccacgccggtattgggcaccaactccttcgctgtccgggacgacagtagcggcggggggcgcaaccctctccaactgcccttcaatttcacctggccgggtaccttctcgctcatcatcgaagcttggcacgcgccaggagacgacctgcggccagaggccttgccaccagatgcactcatcagcaagatcgccatccagggctccctagttgtgggtcagaactggttattggatgagcaaaccagcaccctcacaaggctgcgctactcttaccgggtcatctgcagtgacaactactatggagacaactgctcccgcctgtgcaagaagcgcaatgaccacttcggccactatgtgtgccagccagatggcaacttgtcctgcctgcccggttggactggggaatattgccaacagcctatctgtctttcgggctgtcatgaacagaatggctactgcagcaagccagcagagtgcctctgccgcccaggctggcagggccggctgtgtaacgaatgcatcccccacaatggctgtcgccacggcacctgcagcactccctggcaatgtacttgtgatgagggctggggaggcctgttttgtgaccaagatctcaactactgcacccaccactccccatgcaagaatggggcaacgtgctccaacagtgggcagcgaagctacacctgcacctgtcgcccaggctacactggtgtggactgtgagctggagctcagcgagtgtgacagcaacccctgtcgcaatggaggcagctgtaaggaccaggaggatggctaccactgcctgtgtcctccgggctactatggcctgcattgtgaacacagcaccttgagctgcgccgactccccctgcttcaatgggggctcctgccgggagcgcaaccagggggccaactatgcttgtgaatgtccccccaacttcaccggctccaactgcgagaagaaagtggacaggtgcaccagcaacccctgtgccaacgggggacagtgcctgaaccgaggtccaagccgcatgtgccgctgccgtcctggattcacgggcacctactgtgaactccacgtcagcgactgtgcccgtaacccttgcgcccacggtggcacttgccatgacctggagaatgggctcatgtgcacctgccctgccggcttctctggccgacgctgtgaggtgcggacatccatcgatgcctgtgcctcgagtccctgcttcaacagggccacctgctacaccgacctctccacagacacctttgtgtgcaactgcccttatggctttgtgggcagccgctgcgagttccccgtgggcttgccgcccagcttcccctgggtggccgtctcgctgggtgtggggctggcagtgctgctggtactgctgggcatggtggcagtggctgtgcggcagctgcggcttcgacggccggacgacggcagcagggaagccatgaacaacttgtcggacttccagaaggacaacctgattcctgccgcccagcttaaaaacacaaaccagaagaaggagctggaagtggactgtggcctggacaagtccaactgtggcaaacagcaaaaccacacattggactataatctggccccagggcccctggggcgggggaccatgccaggaaagtttccccacagtgacaagagcttaggagagaaggcgccactgcggttacacagtgaaaagccagagtgtcggatatcagcgatgtgctcccccagggactccatgtaccagtctgtgtgtttgatatcagaggagaggaatgaatgtgtcattgccacggaggtataaggcaggagcctacctggacatccctgctcagccccgcggctggaccttccttctgcattgtttacattgcatcctggatgggacgtttttcatatgcaacgtgctgctctcaggaggaggagggaatggcaggaaccggacagactgtgaacttgccaagagatgcaatacccttccacacctttgggtgtctgtctggcatcagattggcagctgcaccaaccagaggaacagaagagaagagagtggcagtagccccatggggcccggagctgctgtggcctccactggcatccgtgtttccaaaagtgcctttggcccagccaagggtgccaggcctaactggggcactcagggcagtgtgttggaaattccactgagggggaaatcaggtgctgcggccgc

SEQ ID NO: 34 - protein, 685 aa, Homo Sapiens
MAAASRSASGWALLLLVALWQQRAAGSGVFQLQLQEFINERGVLASGRPCEPGCRTFFRVCLKHFQAVVSPGPCTFGTVSTPVLGTNSFAVRDDSSGGGRNPLQLPFNFTWPGTFSLIIEAWHAPGDDLRPEALPPDALISKIAIQGSLVVGQNWLLDEQTSTLTRLRYSYRVICSDNYYGDNCSRLCKKRNDHFGHYVCQPDGNLSCLPGWTGEYCQQPICLSGCHEQNGYCSKPAECLCRPGWQGRLCNECIPHNGCRHGTCSTPWQCTCDEGWGGLFCDQDLNYCTHHSPCKNGATCSNSGQRSYTCTCRPGYTGVDCELELSECDSNPCRNGGSCKDQEDGYHCLCPPGYYGLHCEHSTLSCADSPCFNGGSCRERNQGANYACECPPNFTGSNCEKKVDRCTSNPCANGGQCLNRGPSRMCRCRPGFTGTYCELHVSDCARNPCAHGGTCHDLENGLMCTCPAGFSGRRCEVRTSIDACASSPCFNRATCYTDLSTDTFVCNCPYGFVGSRCEFPVGLPPSFPWVAVSLGVGLAVLLVLLGMVAVAVRQLRLRRPDDGSREAMNNLSDFQKDNLIPAAQLKNTNQKKELEVDCGLDKSNCGKQQNHTLDYNLAPGPLGRGTMPGKFPHSDKSLGEKAPLRLHSEKPECRISAMCSPRDSMYQSVCLISEERNECVIATEV

SEQ ID NO: 35 - DNA, 2800 bp, Homo Sapiens
  CDS (338)..(2395)
gtcgacccacgcgtccggctgcgcgcaggccgggaacacgaggccaagagccgcagccccagccgccttggtgcagcgtacaccggcactagcccgcttgcagccccaggattagacagaagacgcgtcctcggcgcggtcgccgcccagccgtagtcacctggattacctacagcggcagctgcagcggagccagcgagaaggccaaaggggagcagcgtcccgagaggagcgcctcttttcagggaccccgccggctggcggacgcgcgggaaagcggcgtcgcgaacagagccagattgagggcccgcgggtggagagagcgacgcccgaggggatggcggcagcgtcccggagcgcctctggctgggcgctactgctgctggtggcactttggcagcagcgcgcggccggctccggcgtcttccagctgcagctgcaggagttcatcaacgagcgcggcgtactggccagtgggcggccttgcgagcccggctgccggactttcttccgcgtctgccttaagcacttccaggcggtcgtctcgcccggaccctgcaccttcgggaccgtctccacgccggtattgggcagcaactccttcgctgtccgggacgacagtagcggcggggggcgcaaccctctccaactgcccttcaatttcacctggccgggtaccttctcgctcatcatcgaagcttggcacgcgccaggagacgacctgcggccagaggccttgccaccagatgcactcatcagcaagatcgccatccagggctccctagctgtgggtcagaactggttattggatgagcaaaccagcaccctcacaaggctgcgctactcttaccgggtcatctgcagtgacaactactatggagacaactgctcccgcctgtgcaagaagcgcaatgaccacttcggccactatgtgtgccagccagatggcaacttgtcctgcctgcccggttggactggggaatattgccaacagcctatctgtctttcgggctgtcatgaacagaatggctactgcagcaagccagcagagtgcctctgccgcccaggctggcagggccggctgtgtaacgaatgcatcccccacaatggctgtcgccacggcacctgcagcactccctggcaatgtacttgtgatgagggctggggaggcctgttttgtgaccaagatctcaactactgcacccaccactccccatgcaagaatggggcaacgtgctccaacagtgggcagcgaagctacacctgcacctgtcgcccaggctacactggtgtggactgtgagctggagctcagcgagtgtgacagcaacccctgtcgcaatggaggcagctgtaaggaccaggaggatggctaccactgcctgtgtcctccgggctactatggcctgcattgtgaacacagcaccttgagctgcgccgactccccctgcttcaatgggggctcctgccgggagcgcaaccagggggccaactatgcttgtgaatgtccccccaacttcaccggctccaactgcgagaagaaagtggacaggtgcaccagcaacccctgtgccaacgggggacagtgcctgaaccgaggtccaagccgcatgtgccgctgccgtcctggattcacgggcacctactgtgaactccacgtcagcgactgtgcccgtaacccttgcgcccacggtggcacttgccatgacctggagaatgggctcatgtgcacctgccctgccggcttctctggccgacgctgtgaggtgcggacatccatcgatgcctgtgcctcgagtccctgcttcaacagggccacctgctacaccgacctctccacagacacctttgtgtgcaactgcccttatggctttgtgggcagccgctgcgagttccccgtgggcttgccgcccagcttcccctgggtggccgtctcgctgggtgtggggctggcagtgctgctggtactgctgggcatggtggcagtggctgtgcggcagctgcggcttcgacggccggacgacggcagcagggaagccatgaacaacttgtcggacttccagaaggacaacctgattcctgccgcccagcttaaaaacacaaaccagaagaaggagctggaagtggactgtggcctggacaagtccaactgtggcaaacagcaaaaccacacattggactataatctggccccagggcccctggggcgggggaccatgccaggaaagtttccccacagtgacaagagcttaggagagaaggcgccactgcggttacacagtgaaaagccagagtgtcggatatcagcgatgtgctcccccagggactccatgtaccagtctgtgtgtttgatatcagaggagaggaatgaatgtgtcattgccacggaggtataaggcaggagcctacctggacatccctgctcagccccgcggctggaccttccttctgcattgtttacattgcatcctggatgggacgtttttcatatgcaacgtgctgctctcaggaggaggagggaatggcaggaaccggacagactgtgaacttgccaagagatgcaatacccttccacacctttgggtgtctgtctggcatcagattggcagctgcaccaaccagaggaacagaagagaagagagtggcagtagccccatggggcccggagctgctgtggcctccactggcatccgtgtttccaaaagtgcctttggcccagccaagggtgccaggcctaactggggcactcagggcagtgtgttggaaattccactgagggggaaatcaggtgctgcggccgc

SEQ ID NO: 36 - protein, 685 aa, Homo Sapiens
MAAASRSASGWALLLLVALWQQRAAGSGVFQLQLQEFINERGVLASGRPCEPGCRTFFRVCLKHFQAVVSPGPCTFGTVSTPVLGSNSFAVRDDSSGGGRNPLQLPFNFTWPGTFSLIIEAWHAPGDDLRPEALPPDALISKIAIQGSLAVGQNWLLDEQTSTLTRLRYSYRVICSDNYYGDNCSRLCKKRNDHFGHYVCQPDGNLSCLPGWTGEYCQQPICLSGCHEQNGYCSKPAECLCRPGWQGRLCNECIPHNGCRHGTCSTPWQCTCDEGWGGLFCDQDLNYCTHHSPCKNGATCSNSGQRSYTCTCRPGYTGVDCELELSECDSNPCRNGGSCKDQEDGYHCLCPPGYYGLHCEHSTLSCADSPCFNGGSCRERNQGANYACECPPNFTGSNCEKKVDRCTSNPCANGGQCLNRGPSRMCRCRPGFTGTYCELHVSDCARNPCAHGGTCHDLENGLMCTCPAGFSGRRCEVRTSIDACASSPCFNRATCYTDLSTDTFVCNCPYGFVGSRCEFPVGLPPSFPWVAVSLGVGLAVLLVLLGMVAVAVRQLRLRRPDDGSREAMNNLSDFQKDNLIPAAQLKNTNQKKELEVDCGLDKSNCGKQQNHTLDYNLAPGPLGRGTMPGKFPHSDKSLGEKAPLRLHSEKPECRISAMCSPRDSMYQSVCLISEERNECVIATEV

SEQ ID NO: 37 - DNA, 2800 bp, Homo Sapiens
  CDS (338)..(2395)
gtcgacccacgcgtccggctgcgcgcaggccgggaacacgaggccaagagccgcagccccagccgccttggtgcagcgtacaccggcactagcccgcttgcagccccaggattagacagaagacgcgtcctcggcgcggtcgccgcccagccgtagtcacctggattacctacagcggcagctgcagcggagccagcgagaaggccaaaggggagcagcgtcccgagaggagcgcctcttttcagggaccccgccggctggcggacgcgcgggaaagcggcgtcgcgaacagagccagattgagggcccgcgggtggagagagcgacgcccgaggggatggcggcagcgtcccggagcgcctctggctgggcgctactgctgctggtggcactttggcagcagcgcgcggccggctccggcgtcttccagctgcagctgcaggagttcatcaacgagcgcggcgtactggccagtgggcggccttgcgagcccggctgccggactttcttccgcgtctgccttaagcacttccaggcggtcgtctcgcccggaccctgcaccttcgggaccgtctccacgccggtattgggcaccaactccttcgctgtccgggacgacagtagcggcggggggcgcaaccctctccaactgcccttcaatttcacctggccgggtaccttctcgctcatcatcgaagcttggcacgcgccaggagacgacctgcggccagaggccttgccaccagatgcactcatcagcaagatcgccatccagggctccctagctgtgggtcagaactggttattggatgagcaaaccagcaccctcacaaggctgcgctactcttaccgggtcatctgcagtgacaactactatggagaaaactgctcccgcctgtgcaagaagcgcaatgaccacttcggccactatgtgtgccagccagatggcaacttgtcctgcctgcccggttggactggggaatattgccaacagcctatctgtctttcgggctgtcatgaacagaatggctactgcagcaagccagcagagtgcctctgccgcccaggctggcagggccggctgtgtaacgaatgcatcccccacaatggctgtcgccacggcacctgcagcactccctggcaatgtacttgtgatgagggctggggaggcctgttttgtgaccaagatctcaactactgcacccaccactccccatgcaagaatggggcaacgtgctccaacagtgggcagcgaagctacacctgcacctgtcgcccaggctacactggtgtggactgtgagctggagctcagcgagtgtgacagcaacccctgtcgcaatggaggcagctgtaaggaccaggaggatggctaccactgcctgtgtcctccgggctactatggcctgcattgtgaacacagcaccttgagctgcgccgactccccctgcttcaatgggggctcctgccgggagcgcaaccagggggccaactatgcttgtgaatgtccccccaacttcaccggctccaactgcgagaagaaagtggacaggtgcaccagcaacccctgtgccaacgggggacagtgcctgaaccgaggtccaagccgcatgtgccgctgccgtcctggattcacgggcacctactgtgaactccacgtcagcgactgtgcccgtaacccttgcgcccacggtggcacttgccatgacctggagaatgggctcatgtgcacctgccctgccggcttctctggccgacgctgtgaggtgcggacatccatcgatgcctgtgcctcgagtccctgcttcaacagggccacctgctacaccgacctctccacagacacctttgtgtgcaactgcccttatggctttgtgggcagccgctgcgagttccccgtgggcttgccgcccagcttcccctgggtggccgtctcgctgggtgtggggctggcagtgctgctggtactgctgggcatggtggcagtggctgtgcggcagctgcggcttcgacggccggacgacggcagcagggaagccatgaacaacttgtcggacttccagaaggacaacctgattcctgccgcccagcttaaaaacacaaaccagaagaaggagctggaagtggactgtggcctggacaagtccaactgtggcaaacagcaaaaccacacattggactataatctggccccagggcccctggggcgggggaccatgccaggaaagtttccccacagtgacaagagcttaggagagaaggcgccactgcggttacacagtgaaaagccagagtgtcggatatcagcgatgtgctcccccagggactccatgtaccagtctgtgtgtttgatatcagaggagaggaatgaatgtgtcattgccacggaggtataaggcaggagcctacctggacatccctgctcagccccgcggctggaccttccttctgcattgtttacattgcatcctggatgggacgtttttcatatgcaacgtgctgctctcaggaggaggagggaatggcaggaaccggacagactgtgaacttgccaagagatgcaatacccttccacacctttgggtgtctgtctggcatcagattggcagctgcaccaaccagaggaacagaagagaagagagtggcagtagccccatggggcccggagctgctgtggcctccactggcatccgtgtttccaaaagtgcctttggcccagccaagggtgccaggcctaactggggcactcagggcagtgtgttggaaattccactgagggggaaatcaggtgctgcggccgc

SEQ ID NO: 38 - protein, 685 aa, Homo Sapiens
MAAASRSASGWALLLLVALWQQRAAGSGVFQLQLQEFINERGVLASGRPCEPGCRTFFRVCLKHFQAVVSPGPCTFGTVSTPVLGTNSFAVRDDSSGGGRNPLQLPFNFTWPGTFSLIIEAWHAPGDDLRPEALPPDALISKIAIQGSLAVGQNWLLDEQTSTLTRLRYSYRVICSDNYYGENCSRLCKKRNDHFGHYVCQPDGNLSCLPGWTGEYCQQPICLSGCHEQNGYCSKPAECLCRPGWQGRLCNECIPHNGCRHGTCSTPWQCTCDEGWGGLFCDQDLNYCTHHSPCKNGATCSNSGQRSYTCTCRPGYTGVDCELELSECDSNPCRNGGSCKDQEDGYHCLCPPGYYGLHCEHSTLSCADSPCFNGGSCRERNQGANYACECPPNFTGSNCEKKVDRCTSNPCANGGQCLNRGPSRMCRCRPGFTGTYCELHVSDCARNPCAHGGTCHDLENGLMCTCPAGFSGRRCEVRTSIDACASSPCFNRATCYTDLSTDTFVCNCPYGFVGSRCEFPVGLPPSFPWVAVSLGVGLAVLLVLLGMVAVAVRQLRLRRPDDGSREAMNNLSDFQKDNLIPAAQLKNTNQKKELEVDCGLDKSNCGKQQNHTLDYNLAPGPLGRGTMPGKFPHSDKSLGEKAPLRLHSEKPECRISAMCSPRDSMYQSVCLISEERNECVIATEV

SEQ ID NO: 39 - DNA, 3133 bp, Mus Musculus
  CDS (39)..(2099)
gtcgacccacgcgtccggtggagaggacaccccaagggatgacgcctgtgtcccggagcgcctgtcgctgggcgctactgctgctggcggtactgtggccgcagcagcgcgctgcgggctccggcatcttccagctgcggctgcaggagttcgtcaaccagcgcggtatgctggccaatgggcagtcctgcgaaccgggctgccggactttcttccgcatctgccttaagcacttccaggcaaccttctccgagggaccctgcacctttggcaatgtctccacgccggtattgggcaccaactccttcgtcgtcagggacaagaatagcggcagtggtcgcaaccctctgcagttgcccttcaatttcacctggccgggaaccttctcactcaacatccaagcttggcacacaccgggagacgacctgcggccagagacttcgccaggaaactctctcatcagccaaatcatcatccaaggctctcttgctgtgggtaagatttggcgaacagacgagcaaaatgacaccctcaccagactgagctactcttaccgggtcatctgcagtgacaactactatggagagagctgttctcgcctatgcaagaagcgcgatgaccacttcggacattatgagtgccagccagatggcagcctgtcctgcctgccgggctggactgggaagtactgtgaccagcctatatgtctttctggctgtcatgagcagaatggttactgcagcaagccagatgagtgcatctgccgtccaggttggcagggtcgcctgtgcaatgaatgtatcccccacaatggctgtcgtcatggcacctgcagcatcccctggcagtgtgcctgcgatgagggatggggaggtctgttttgtgaccaagatctcaactactgtactcaccactctccgtgcaagaatggatcaacgtgttccaacagtgggccaaagggttatacctgcacctgtctcccaggctacactggtgagcactgtgagctgggactcagcaagtgtgccagcaacccctgtcgaaatggtggcagctgtaaggaccaggagaatagctaccactgcctgtgtcccccaggctactatggccagcactgtgagcatagtaccttgacctgcgcggactcaccctgcttcaatgggggctcttgccgggagcgcaaccaggggtccagttatgcctgcgaatgcccccccaactttaccggctctaactgtgagaagaaagtagacaggtgtaccagcaacccgtgtgccaatggaggccagtgccagaacagaggtccaagccgaacctgccgctgccggcctggattcacaggcacccactgtgaactgcacatcagcgattgtgcccgaagtccctgtgcccacgggggcacttgccacgatctggagaatgggcctgtgtgcacctgccccgctggcttctctggaaggcgctgcgaggtgcggataacccacgatgcctgtgcctccggaccctgcttcaatggggccacctgctacactggcctctccccaaacaacttcgtctgcaactgtccttatggctttgtgggcagccgctgcgagtttcccgtgggcttgccacccagcttcccctgggtagctgtctcgctgggcgtggggctagtggtactgctggtgctcctggtcatggtggtagtggctgtgcggcagctgcggcttcggaggcccgatgacgagagcagggaagccatgaacaatctgtcagacttccagaaggacaacctaatccctgccgcccagctcaaaaacacaaaccagaagaaggagctggaagtggactgtggtctggacaagtccaattgtggcaaactgcagaaccacacattggactacaatctagccccgggactcctaggacggggcggcatgcctgggaagtatcctcacagtgacaagagcttaggagagaaggtgccacttcggttacacagtgagaagccagagtgtcgaatatcagccatttgctctcccagggactctatgtaccaatcagtgtgtttgatatcagaagagaggaacgagtgtgtgattgccacagaggtataaggcaggagcctactcagacacccagctccggcccagcagctgggccttccttctgcattgtttacattgcatcctgtatgggacatctttagtatgcacagtgctgctctgcggaggaggaggaaatggcatgaactgaacagactgtgaacccgccaagagtcgcaccggctctgcacacctccaggagtctgcctggcttcagatgggcagccccgccaagggaacagagttgaggagttagaggagcatcagttgagctgatatctaaggtgcctctcgaacttggacttgctctgccaacagtggtcatcatggagctcttgactgttctccagagagtggcagtggccctagtgggtcttggcgctgctgtagctcctgtgggcatctgtatttccaaagtgcctttgcccagactccatcctcacagctgggcccaaatgagaaagcagagaggaggcttgcaaaggataggcctcccgcaggcagaacagccttggagtttggcattaagcaggagctactctgcaggtgaggaaagcccgaggaggggacacgtgtgactcctgcctccaaccccagtaggtggagtgccacctgtagcctctaggcaagagttggtccttcccctggtcctggtgcctctgggctcatgtgaacagatgggcttagggcacgccccttttgccagccaggggtacaggcctcactggggagctcagggccttcatgctaaactcccaataagggagatggggggaagggggctgtggcctaggcccttccctccctcacacccatttctgggcccttgagcctgggctccaccagtgcccactgctgccccgagaccaaccttgaagccgatcttcaaaaatcaataatatgaggttttgttttgtagtttattttggaatctagtattttgataatttaagaatcagaagcactggcctttctacattttataacattattttgtatataatgtgtatttataatatgaaaaaaaaaaaaaaaagggcggccgc

SEQ ID NO: 40 - protein, 686 aa, Mus Musculus
MTPVSRSACRWALLLLAVLWPQQRAAGSGIFQLRLQEFVNQRGMLANGQSCEPGCRTFFRICLKHFQATFSEGPCTFGNVSTPVLGTNSFVVRDKNSGSGRNPLQLPFNFTWPGTFSLNIQAWHTPGDDLRPETSPGNSLISQIIIQGSLAVGKIWRTDEQNDTLTRLSYSYRVICSDNYYGESCSRLCKKRDDHFGHYECQPDGSLSCLPGWTGKYCDQPICLSGCHEQNGYCSKPDECICRPGWQGRLCNECIPHNGCRHGTCSIPWQCACDEGWGGLFCDQDLNYCTHHSPCKNGSTCSNSGPKGYTCTCLPGYTGEHCELGLSKCASNPCRNGGSCKDQENSYHCLCPPGYYGQHCEHSTLTCADSPCFNGGSCRERNQGSSYACECPPNFTGSNCEKKVDRCTSNPCANGGQCQNRGPSRTCRCRPGFTGTHCELHISDCARSPCAHGGTCHDLENGPVCTCPAGFSGRRCEVRITHDACASGPCFNGATCYTGLSPNNFVCNCPYGFVGSRCEFPVGLPPSFPWVAVSLGVGLVVLLVLLVMVVVAVRQLRLRRPDDESREAMNNLSDFQKDNLIPAAQLKNTNQKKELEVDCGLDKSNCGKLQNHTLDYNLAPGLLGRGGMPGKYPHSDKSLGEKVPLRLHSEKPECRISAICSPRDSMYQSVCLISEERNECVIATEV

SEQ ID NO: 41 - DNA, 3133 bp, Mus Musculus
  CDS (39)..(2099)
gtcgacccacgcgtccggtggagaggacaccccaagggatgacgcctgcgacccggagcgcctgtcgctgggcgctactgctgctggcggtactgtggccgcagcagcgcgctgcgggctccggcatcttccagctgcggctgcaggagttcgtcaaccagcgcggtatgctggccaatgggcagtcctgcgaaccgggctgccggactttcttccgcatctgccttaagcacttccaggcaaccttctccgagggaccctgcacctttggcaatgtctccacgccggtattgggcaccaactccttcgtcgtcagggacaagaatagcggcagtggtcgcaaccctctgcagttgcccttcaatttcacctggccgggaaccttctcactcaacatccaagcttggcacacaccgggagacgacctgcggccagagacttcgccaggaaactctctcatcagccaaatcatcatccaaggctctcttgctgtgggtaagatttggcgaacagacgagcaaaatgacaccctcaccagactgagctactcttaccgggtcatctgcagtgacaactactatggagagagctgttctcgcctatgcaagaagcgcgatgaccacttcggacattatgagtgccagccagatggcagcctgtcctgcctgccgggctggactgggaagtactgtgaccagcctatatgtctttctggctgtcatgagcagaatggttactgcagcaagccagatgagtgcatctgccgtccaggttggcagggtcgcctgtgcaatgaatgtatcccccacaatggctgtcgtcatggcacctgcagcatcccctggcagtgtgcctgcgatgagggatggggaggtctgttttgtgaccaagatctcaactactgtactcaccactctccgtgcaagaatggatcaacgtgttccaacagtgggccaaagggttatacctgcacctgtctcccaggctacactggtgagcactgtgagctgggactcagcaagtgtgccagcaacccctgtcgaaatggtggcagctgtaaggaccaggagaatagctaccactgcctgtgtcccccaggctactatggccagcactgtgagcatagtaccttgacctgcgcggactcaccctgcttcaatgggggctcttgccgggagcgcaaccaggggtccagttatgcctgcgaatgcccccccaactttaccggctctaactgtgagaagaaagtagacaggtgtaccagcaacccgtgtgccaatggaggccagtgccagaacagaggtccaagccgaacctgccgctgccggcctggattcacaggcacccactgtgaactgcacatcagcgattgtgcccgaagtccctgtgcccacgggggcacttgccacgatctggagaatgggcctgtgtgcacctgccccgctggcttctctggaaggcgctgcgaggtgcggataacccacgatgcctgtgcctccggaccctgcttcaatggggccacctgctacactggcctctccccaaacaacttcgtctgcaactgtccttatggctttgtgggcagccgctgcgagtttcccgtgggcttgccacccagcttcccctgggtagctgtctcgctgggcgtggggctagtggtactgctggtgctcctggtcatggtggtagtggctgtgcggcagctgcggcttcggaggcccgatgacgagagcagggaagccatgaacaatctgtcagacttccagaaggacaacctaatccctgccgcccagctcaaaaacacaaaccagaagaaggagctggaagtggactgtggtctggacaagtccaattgtggcaaactgcagaaccacacattggactacaatctagccccgggactcctaggacggggcggcatgcctgggaagtatcctcacagtgacaagagcttaggagagaaggtgccacttcggttacacagtgagaagccagagtgtcgaatatcagccatttgctctcccagggactctatgtaccaatcagtgtgtttgatatcagaagagaggaacgagtgtgtgattgccacagaggtataaggcaggagcctactcagacacccagctccggcccagcagctgggccttccttctgcattgtttacattgcatcctgtatgggacatctttagtatgcacagtgctgctctgcggaggaggaggaaatggcatgaactgaacagactgtgaacccgccaagagtcgcaccggctctgcacacctccaggagtctgcctggcttcagatgggcagccccgccaagggaacagagttgaggagttagaggagcatcagttgagctgatatctaaggtgcctctcgaacttggacttgctctgccaacagtggtcatcatggagctcttgactgttctccagagagtggcagtggccctagtgggtcttggcgctgctgtagctcctgtgggcatctgtatttccaaagtgcctttgcccagactccatcctcacagctgggcccaaatgagaaagcagagaggaggcttgcaaaggataggcctcccgcaggcagaacagccttggagtttggcattaagcaggagctactctgcaggtgaggaaagcccgaggaggggacacgtgtgactcctgcctccaaccccagtaggtggagtgccacctgtagcctctaggcaagagttggtccttcccctggtcctggtgcctctgggctcatgtgaacagatgggcttagggcacgccccttttgccagccaggggtacaggcctcactggggagctcagggccttcatgctaaactcccaataagggagatggggggaagggggctgtggcctaggcccttccctccctcacacccatttctgggcccttgagcctgggctccaccagtgcccactgctgccccgagaccaaccttgaagccgatcttcaaaaatcaataatatgaggttttgttttgtagtttattttggaatctagtattttgataatttaagaatcagaagcactggcctttctacattttataacattattttgtatataatgtgtatttataatatgaaaaaaaaaaaaaaaagggcggccgc

SEQ ID NO: 42 - protein, 686 aa, Mus Musculus
MTPATRSACRWALLLLAVLWPQQRAAGSGIFQLRLQEFVNQRGMLANGQSCEPGCRTFFRICLKHFQATFSEGPCTFGNVSTPVLGTNSFVVRDKNSGSGRNPLQLPFNFTWPGTFSLNIQAWHTPGDDLRPETSPGNSLISQIIIQGSLAVGKIWRTDEQNDTLTRLSYSYRVICSDNYYGESCSRLCKKRDDHFGHYECQPDGSLSCLPGWTGKYCDQPICLSGCHEQNGYCSKPDECICRPGWQGRLCNECIPHNGCRHGTCSIPWQCACDEGWGGLFCDQDLNYCTHHSPCKNGSTCSNSGPKGYTCTCLPGYTGEHCELGLSKCASNPCRNGGSCKDQENSYHCLCPPGYYGQHCEHSTLTCADSPCFNGGSCRERNQGSSYACECPPNFTGSNCEKKVDRCTSNPCANGGQCQNRGPSRTCRCRPGFTGTHCELHISDCARSPCAHGGTCHDLENGPVCTCPAGFSGRRCEVRITHDACASGPCFNGATCYTGLSPNNFVCNCPYGFVGSRCEFPVGLPPSFPWVAVSLGVGLVVLLVLLVMVVVAVRQLRLRRPDDESREAMNNLSDFQKDNLIPAAQLKNTNQKKELEVDCGLDKSNCGKLQNHTLDYNLAPGLLGRGGMPGKYPHSDKSLGEKVPLRLHSEKPECRISAICSPRDSMYQSVCLISEERNECVIATEV

SEQ ID NO: 43 - DNA, 3133 bp, Mus Musculus
  CDS (39)..(2099)
gtcgacccacgcgtccggtggagaggacaccccaagggatgacgcctgcgtcccggagcgcctgtcgctgggcgctactgctgctggcggtactgtggccgcagcagcacgctgcgggctccggcatcttccagctgcggctgcaggagttcgtcaaccagcgcggtatgctggccaatgggcagtcctgcgaaccgggctgccggactttcttccgcatctgccttaagcacttccaggcaaccttctccgagggaccctgcacctttggcaatgtctccacgccggtattgggcaccaactccttcgtcgtcagggacaagaatagcggcagtggtcgcaaccctctgcagttgcccttcaatttcacctggccgggaaccttctcactcaacatccaagcttggcacacaccgggagacgacctgcggccagagacttcgccaggaaactctctcatcagccaaatcatcatccaaggctctcttgctgtgggtaagatttggcgaacagacgagcaaaatgacaccctcaccagactgagctactcttaccgggtcatctgcagtgacaactactatggagagagctgttctcgcctatgcaagaagcgcgatgaccacttcggacattatgagtgccagccagatggcagcctgtcctgcctgccgggctggactgggaagtactgtgaccagcctatatgtctttctggctgtcatgagcagaatggttactgcagcaagccagatgagtgcatctgccgtccaggttggcagggtcgcctgtgcaatgaatgtatcccccacaatggctgtcgtcatggcacctgcagcatcccctggcagtgtgcctgcgatgagggatggggaggtctgttttgtgaccaagatctcaactactgtactcaccactctccgtgcaagaatggatcaacgtgttccaacagtgggccaaagggttatacctgcacctgtctcccaggctacactggtgagcactgtgagctgggactcagcaagtgtgccagcaacccctgtcgaaatggtggcagctgtaaggaccaggagaatagctaccactgcctgtgtcccccaggctactatggccagcactgtgagcatagtaccttgacctgcgcggactcaccctgcttcaatgggggctcttgccgggagcgcaaccaggggtccagttatgcctgcgaatgcccccccaactttaccggctctaactgtgagaagaaagtagacaggtgtaccagcaacccgtgtgccaatggaggccagtgccagaacagaggtccaagccgaacctgccgctgccggcctggattcacaggcacccactgtgaactgcacatcagcgattgtgcccgaagtccctgtgcccacgggggcacttgccacgatctggagaatgggcctgtgtgcacctgccccgctggcttctctggaaggcgctgcgaggtgcggataacccacgatgcctgtgcctccggaccctgcttcaatggggccacctgctacactggcctctccccaaacaacttcgtctgcaactgtccttatggctttgtgggcagccgctgcgagtttcccgtgggcttgccacccagcttcccctgggtagctgtctcgctgggcgtggggctagtggtactgctggtgctcctggtcatggtggtagtggctgtgcggcagctgcggcttcggaggcccgatgacgagagcagggaagccatgaacaatctgtcagacttccagaaggacaacctaatccctgccgcccagctcaaaaacacaaaccagaagaaggagctggaagtggactgtggtctggacaagtccaattgtggcaaactgcagaaccacacattggactacaatctagccccgggactcctaggacggggcggcatgcctgggaagtatcctcacagtgacaagagcttaggagagaaggtgccacttcggttacacagtgagaagccagagtgtcgaatatcagccatttgctctcccagggactctatgtaccaatcagtgtgtttgatatcagaagagaggaacgagtgtgtgattgccacagaggtataaggcaggagcctactcagacacccagctccggcccagcagctgggccttccttctgcattgtttacattgcatcctgtatgggacatctttagtatgcacagtgctgctctgcggaggaggaggaaatggcatgaactgaacagactgtgaacccgccaagagtcgcaccggctctgcacacctccaggagtctgcctggcttcagatgggcagccccgccaagggaacagagttgaggagttagaggagcatcagttgagctgatatctaaggtgcctctcgaacttggacttgctctgccaacagtggtcatcatggagctcttgactgttctccagagagtggcagtggccctagtgggtcttggcgctgctgtagctcctgtgggcatctgtatttccaaagtgcctttgcccagactccatcctcacagctgggcccaaatgagaaagcagagaggaggcttgcaaaggataggcctcccgcaggcagaacagccttggagtttggcattaagcaggagctactctgcaggtgaggaaagcccgaggaggggacacgtgtgactcctgcctccaaccccagtaggtggagtgccacctgtagcctctaggcaagagttggtccttcccctggtcctggtgcctctgggctcatgtgaacagatgggcttagggcacgccccttttgccagccaggggtacaggcctcactggggagctcagggccttcatgctaaactcccaataagggagatggggggaagggggctgtggcctaggcccttccctccctcacacccatttctgggcccttgagcctgggctccaccagtgcccactgctgccccgagaccaaccttgaagccgatcttcaaaaatcaataatatgaggttttgttttgtagtttattttggaatctagtattttgataatttaagaatcagaagcactggcctttctacattttataacattattttgtatataatgtgtatttataatatgaaaaaaaaaaaaaaaagggcggccgc

SEQ ID NO: 44 - protein, 686 aa, Mus Musculus
MTPASRSACRWALLLLAVLWPQQHAAGSGIFQLRLQEFVNQRGMLANGQSCEPGCRTFFRICLKHFQATFSEGPCTFGNVSTPVLGTNSFVVRDKNSGSGRNPLQLPFNFTWPGTFSLNIQAWHTPGDDLRPETSPGNSLISQIIIQGSLAVGKIWRTDEQNDTLTRLSYSYRVICSDNYYGESCSRLCKKRDDHFGHYECQPDGSLSCLPGWTGKYCDQPICLSGCHEQNGYCSKPDECICRPGWQGRLCNECIPHNGCRHGTCSIPWQCACDEGWGGLFCDQDLNYCTHHSPCKNGSTCSNSGPKGYTCTCLPGYTGEHCELGLSKCASNPCRNGGSCKDQENSYHCLCPPGYYGQHCEHSTLTCADSPCFNGGSCRERNQGSSYACECPPNFTGSNCEKKVDRCTSNPCANGGQCQNRGPSRTCRCRPGFTGTHCELHISDCARSPCAHGGTCHDLENGPVCTCPAGFSGRRCEVRITHDACASGPCFNGATCYTGLSPNNFVCNCPYGFVGSRCEFPVGLPPSFPWVAVSLGVGLVVLLVLLVMVVVAVRQLRLRRPDDESREAMNNLSDFQKDNLIPAAQLKNTNQKKELEVDCGLDKSNCGKLQNHTLDYNLAPGLLGRGGMPGKYPHSDKSLGEKVPLRLHSEKPECRISAICSPRDSMYQSVCLISEERNECVIATEV

SEQ ID NO: 45 - DNA, 3133 bp, Mus Musculus
  CDS (39)..(2099)
gtcgacccacgcgtccggtggagaggacaccccaagggatgacgcctgcgtcccggagcgcctgtcgctgggcgctactgctgctggcggtactgtggccgcagcagcgcgctgcgggctccggcatctaccagctgcggctgcaggagttcgtcaaccagcgcggtatgctggccaatgggcagtcctgcgaaccgggctgccggactttcttccgcatctgccttaagcacttccaggcaaccttctccgagggaccctgcacctttggcaatgtctccacgccggtattgggcaccaactccttcgtcgtcagggacaagaatagcggcagtggtcgcaaccctctgcagttgcccttcaatttcacctggccgggaaccttctcactcaacatccaagcttggcacacaccgggagacgacctgcggccagagacttcgccaggaaactctctcatcagccaaatcatcatccaaggctctcttgctgtgggtaagatttggcgaacagacgagcaaaatgacaccctcaccagactgagctactcttaccgggtcatctgcagtgacaactactatggagagagctgttctcgcctatgcaagaagcgcgatgaccacttcggacattatgagtgccagccagatggcagcctgtcctgcctgccgggctggactgggaagtactgtgaccagcctatatgtctttctggctgtcatgagcagaatggttactgcagcaagccagatgagtgcatctgccgtccaggttggcagggtcgcctgtgcaatgaatgtatcccccacaatggctgtcgtcatggcacctgcagcatcccctggcagtgtgcctgcgatgagggatggggaggtctgttttgtgaccaagatctcaactactgtactcaccactctccgtgcaagaatggatcaacgtgttccaacagtgggccaaagggttatacctgcacctgtctcccaggctacactggtgagcactgtgagctgggactcagcaagtgtgccagcaacccctgtcgaaatggtggcagctgtaaggaccaggagaatagctaccactgcctgtgtcccccaggctactatggccagcactgtgagcatagtaccttgacctgcgcggactcaccctgcttcaatgggggctcttgccgggagcgcaaccaggggtccagttatgcctgcgaatgcccccccaactttaccggctctaactgtgagaagaaagtagacaggtgtaccagcaacccgtgtgccaatggaggccagtgccagaacagaggtccaagccgaacctgccgctgccggcctggattcacaggcacccactgtgaactgcacatcagcgattgtgcccgaagtccctgtgcccacgggggcacttgccacgatctggagaatgggcctgtgtgcacctgccccgctggcttctctggaaggcgctgcgaggtgcggataacccacgatgcctgtgcctccggaccctgcttcaatggggccacctgctacactggcctctccccaaacaacttcgtctgcaactgtccttatggctttgtgggcagccgctgcgagtttcccgtgggcttgccacccagcttcccctgggtagctgtctcgctgggcgtggggctagtggtactgctggtgctcctggtcatggtggtagtggctgtgcggcagctgcggcttcggaggcccgatgacgagagcagggaagccatgaacaatctgtcagacttccagaaggacaacctaatccctgccgcccagctcaaaaacacaaaccagaagaaggagctggaagtggactgtggtctggacaagtccaattgtggcaaactgcagaaccacacattggactacaatctagccccgggactcctaggacggggcggcatgcctgggaagtatcctcacagtgacaagagcttaggagagaaggtgccacttcggttacacagtgagaagccagagtgtcgaatatcagccatttgctctcccagggactctatgtaccaatcagtgtgtttgatatcagaagagaggaacgagtgtgtgattgccacagaggtataaggcaggagcctactcagacacccagctccggcccagcagctgggccttccttctgcattgtttacattgcatcctgtatgggacatctttagtatgcacagtgctgctctgcggaggaggaggaaatggcatgaactgaacagactgtgaacccgccaagagtcgcaccggctctgcacacctccaggagtctgcctggcttcagatgggcagccccgccaagggaacagagttgaggagttagaggagcatcagttgagctgatatctaaggtgcctctcgaacttggacttgctctgccaacagtggtcatcatggagctcttgactgttctccagagagtggcagtggccctagtgggtcttggcgctgctgtagctcctgtgggcatctgtatttccaaagtgcctttgcccagactccatcctcacagctgggcccaaatgagaaagcagagaggaggcttgcaaaggataggcctcccgcaggcagaacagccttggagtttggcattaagcaggagctactctgcaggtgaggaaagcccgaggaggggacacgtgtgactcctgcctccaaccccagtaggtggagtgccacctgtagcctctaggcaagagttggtccttcccctggtcctggtgcctctgggctcatgtgaacagatgggcttagggcacgccccttttgccagccaggggtacaggcctcactggggagctcagggccttcatgctaaactcccaataagggagatggggggaagggggctgtggcctaggcccttccctccctcacacccatttctgggcccttgagcctgggctccaccagtgcccactgctgccccgagaccaaccttgaagccgatcttcaaaaatcaataatatgaggttttgttttgtagtttattttggaatctagtattttgataatttaagaatcagaagcactggcctttctacattttataacattattttgtatataatgtgtatttataatatgaaaaaaaaaaaaaaaagggcggccgc

SEQ ID NO: 46 - protein, 686 aa, Mus Musculus
MTPASRSACRWALLLLAVLWPQQRAAGSGIYQLRLQEFVNQRGMLANGQSCEPGCRTFFRICLKHFQATFSEGPCTFGNVSTPVLGTNSFVVRDKNSGSGRNPLQLPFNFTWPGTFSLNIQAWHTPGDDLRPETSPGNSLISQIIIQGSLAVGKIWRTDEQNDTLTRLSYSYRVICSDNYYGESCSRLCKKRDDHFGHYECQPDGSLSCLPGWTGKYCDQPICLSGCHEQNGYCSKPDECICRPGWQGRLCNECIPHNGCRHGTCSIPWQCACDEGWGGLFCDQDLNYCTHHSPCKNGSTCSNSGPKGYTCTCLPGYTGEHCELGLSKCASNPCRNGGSCKDQENSYHCLCPPGYYGQHCEHSTLTCADSPCFNGGSCRERNQGSSYACECPPNFTGSNCEKKVDRCTSNPCANGGQCQNRGPSRTCRCRPGFTGTHCELHISDCARSPCAHGGTCHDLENGPVCTCPAGFSGRRCEVRITHDACASGPCFNGATCYTGLSPNNFVCNCPYGFVGSRCEFPVGLPPSFPWVAVSLGVGLVVLLVLLVMVVVAVRQLRLRRPDDESREAMNNLSDFQKDNLIPAAQLKNTNQKKELEVDCGLDKSNCGKLQNHTLDYNLAPGLLGRGGMPGKYPHSDKSLGEKVPLRLHSEKPECRISAICSPRDSMYQSVCLISEERNECVIATEV

SEQ ID NO: 47 - DNA, 24 bp, Mus Musculus
ctccgggacgcaggcgtcatccct

SEQ ID NO: 48 - DNA, 29 bp, Mus Musculus
acaggcgctccgggacgcaggcgtcatcc

SEQ ID NO: 49 - DNA, 26 bp, Mus Musculus
ggtgtcctctccaccggacgcgtggg

SEQ ID NO: 50 - DNA, 22 bp, Mus Musculus
gtcctctccaccggacgcgtgg

SEQ ID NO: 51 - DNA, 20 bp, Homo Sapiens
gtttacattgcatcctggat

SEQ ID NO: 52 - protein, 41 aa, Artificial Sequence
  EGF-like domain consensus sequence
  VARIANT (2)..(5): Xaa is any amino acid
  VARIANT (6)..(9): Xaa is any amino acid or is absent
  VARIANT (11)..(11): Xaa is any amino acid
  VARIANT (12)..(12): Xaa is any amino acid or is absent
  misc_feature (14)..(14): Xaa can be any naturally occurring amino acid
  VARIANT (16)..(20): Xaa is any amino acid
  VARIANT (21)..(24): Xaa is any amino acid or is absent
  VARIANT (25)..(25): Xaa is Trp, Phe or Tyr
  misc_feature (26)..(26): Xaa can be any naturally occurring amino acid
  misc_feature (28)..(28): Xaa can be any naturally occurring amino acid
  VARIANT (30)..(31): Xaa is any amino acid
  VARIANT (32)..(33): Xaa is any amino acid or is absent
  VARIANT (35)..(35): Xaa is Trp, Phe or Tyr
  VARIANT (37)..(37): Xaa is any amino acid
  VARIANT (38)..(39): Xaa is any amino acid or is absent
  VARIANT (40)..(40): Xaa is Phe or Tyr
CXXXXXXXXCXXGXCXXXXXXXXXXXCXCXXXXGXGXXXXC

SEQ ID NO: 53 - DNA, 2133 bp, Homo Sapiens
  CDS (73)..(1275)
gtcgacccacgcgtccgccggagcgctcgcccagccgccgcctccaagcccctgaggtttccggggaccacaatgaacaagttgctgtgctgcgcgctcgtgtttctggacatctccattaagtggaccacccaggaaacgtttcctccaaagtaccttcattatgacgaagaaacttctcatcagctgttgtgtgacaaatgtcctcctggtacctacctaaaacaacactgtacagcaaagtggaagaccgtgtgcgccccttgccctgaccactactacacagacagctggcacaccagtgacgagtgtctatactgcagccccgtgtgcaaggagctgcagtacgtcaagcaggagtgcaatcgcacccacaaccgcgtgtgcgaatgcaaggaagggcgctaccttgagatagagttctgcttgaaacataggagctgccctcctggatttggagtggtgcaagctggaaccccagagcgaaatacagtttgcaaaagatgtccagatgggttcttctcaaatgagacgtcatctaaagcaccctgtagaaaacacacaaattgcagtgtctttggtctcctgctaactcagaaaggaaatgcaacacacgacaacatatgttccggaaacagtgaatcaactcaaaaatgtggaatagatgttaccctgtgtgaggaggcattcttcaggtttgctgttcctacaaagtttacgcctaactggcttagtgtcttggtagacaatttgcctggcaccaaagtaaacgcagagagtgtagagaggataaaacggcaacacagctcacaagaacagactttccagctgctgaagttatggaaacatcaaaacaaagaccaagatatagtcaagaagatcatccaagatattgacctctgtgaaaacagcgtgcagcggcacattggacatgctaacctcaccttcgagcagcttcgtagcttgatggaaagcttaccgggaaagaaagtgggagcagaagacattgaaaaaacaataaaggcatgcaaacccagtgaccagatcctgaagctgctcagtttgtggcgaataaaaaatggcgaccaagacaccttgaagggcctaatgcacgcactaaagcactcaaagacgtaccactttcccaaaactgtcactcagagtctaaagaagaccatcaggttccttcacagcttcacaatgtacaaattgtatcagaagttatttttagaaatgataggtaaccaggtccaatcagtaaaaataagctgcttataactggaaatggccattgagctgtttcctcacaattggcgagatccccatggatgagtaaactgtttctcaggcacttgaggctttcagtgatatctttctcattaccagtgactaattttgccacagggtactaaaagaaactatgatgtggagaaaggactaacatctcctccaataaaccccaaatggttaatccaactgtcagatctggatcgttatctactgactatattttcccttattactgcttgcagtaattcaactggaaattaaaaaaaaaaaactagactccattgtgccttactaaatatgggaatgtctaacttaaatagctttgagatttcagctaygctagaggcttttattagaaagccatatttttttctgtaaaagttactaatatatctgtaacactattacagtattgctatttatattcattcagatataagatttgtacatattatcatcctataaagaaacggtatgacttaattttagaaagaaaattatattctgtttattatgacaaatgaaagagaaaatatatatttttaatggaaagtttgtagcatttttctaataggtactgccatatttttctgtgtggagtatttttataattttatctgtataagctgtaatatcattttatagaaaatgcattatttagtcaattgtttaatgttggaaaacatatgaaatataaattatctgaatattagatgctctgagaaattgaatgtaccttatttaaaagattttatggttttataactatataaatgacattattaaagttttcaaattatttttaaaaaaaaaaaaaaaaaaaaaaaaaaaaagggcggccgc

SEQ ID NO: 54 - protein, 401 aa, Homo Sapiens
MNKLLCCALVFLDISIKWTTQETFPPKYLHYDEETSHQLLCDKCPPGTYLKQHCTAKWKTVCAPCPDHYYTDSWHTSDECLYCSPVCKELQYVKQECNRTHNRVCECKEGRYLEIEFCLKHRSCPPGFGVVQAGTPERNTVCKRCPDGFFSNETSSKAPCRKHTNCSVFGLLLTQKGNATHDNICSGNSESTQKCGIDVTLCEEAFFRFAVPTKFTPNWLSVLVDNLPGTKVNAESVERIKRQHSSQEQTFQLLKLWKHQNKDQDIVKKIIQDIDLCENSVQRHIGHANLTFEQLRSLMESLPGKKVGAEDIEKTIKACKPSDQILKLLSLWRIKNGDQDTLKGLMHALKHSKTYHFPKTVTQSLKKTIRFLHSFTMYKLYQKLFLEMIGNQVQSVKISCL

SEQ ID NO: 55 - DNA, 1203 bp, Homo Sapiens
atgaacaagttgctgtgctgcgcgctcgtgtttctggacatctccattaagtggaccacccaggaaacgtttcctccaaagtaccttcattatgacgaagaaacttctcatcagctgttgtgtgacaaatgtcctcctggtacctacctaaaacaacactgtacagcaaagtggaagaccgtgtgcgccccttgccctgaccactactacacagacagctggcacaccagtgacgagtgtctatactgcagccccgtgtgcaaggagctgcagtacgtcaagcaggagtgcaatcgcacccacaaccgcgtgtgcgaatgcaaggaagggcgctaccttgagatagagttctgcttgaaacataggagctgccctcctggatttggagtggtgcaagctggaaccccagagcgaaatacagtttgcaaaagatgtccagatgggttcttctcaaatgagacgtcatctaaagcaccctgtagaaaacacacaaattgcagtgtctttggtctcctgctaactcagaaaggaaatgcaacacacgacaacatatgttccggaaacagtgaatcaactcaaaaatgtggaatagatgttaccctgtgtgaggaggcattcttcaggtttgctgttcctacaaagtttacgcctaactggcttagtgtcttggtagacaatttgcctggcaccaaagtaaacgcagagagtgtagagaggataaaacggcaacacagctcacaagaacagactttccagctgctgaagttatggaaacatcaaaacaaagaccaagatatagtcaagaagatcatccaagatattgacctctgtgaaaacagcgtgcagcggcacattggacatgctaacctcaccttcgagcagcttcgtagcttgatggaaagcttaccgggaaagaaagtgggagcagaagacattgaaaaaacaataaaggcatgcaaacccagtgaccagatcctgaagctgctcagtttgtggcgaataaaaaatggcgaccaagacaccttgaagggcctaatgcacgcactaaagcactcaaagacgtaccactttcccaaaactgtcactcagagtctaaagaagaccatcaggttccttcacagcttcacaatgtacaaattgtatcagaagttatttttagaaatgataggtaaccaggtccaatcagtaaaaataagctgctta

SEQ ID NO: 56 - DNA, 4291 bp, Homo Sapiens
  CDS (958)..(3216)
gtcgacccacgcgtccgaggagctggggtgagccgcggcggccgtctctcccacccgcagcagcatcctctctgcccttctctgccaccccggggagagccgggagctgcctctttacagcttccacgagccaggggtgcaggcagctgcccccaggaagtttgggcttctgcgtagtttaggggtgcctgcgagcgccccagagggcgaggggccgagggcgatgttgggcgccgcgcggggctgggggcgcccagaagacgtgcgagtgtccgcggtcctgctgctgtctccagtaccctccgcatcccccaagtgatgggaacaagggcccgcccaggcagccgctgtcgccgcaccgccccctcgctcgctctctgcgcgcggagtcacccagtcacactcccggcaccccgagcccttcctccggagctgctgcttctactttggctgctatcgccgccgccgcgggtggcccgctgctgactgggctcgccgggagacggagaagcactttttggccctccctcagcagctctcacaccccaactttgccgccgccgccgcgcctgccctcgcagcggcgctcggccgcacattgtgagggcgcacgccgggaggctccgcaagaccgtggaggcaggaaacggcactactgcgcttctgcctcggctctttgttgttcgctttggatggttcttgaaagtgtctgagcctcctcggaaatcctggggccggagaagacaaaccttggaattcttcctctgcaaaagtctctgagatactgacaagcgtccggaaaggtcgacgagtaattgccctgaaaactcttggctaattgacccacgttgcttatattaagcctttgtgtgtggtgtgtggcttcatacatttggggaccctatttccactccctcctcttggcatgagactgtatacaggatccacccgaggacaatgattgcggagcccgctcacttttacctgtttggattaatatgtctctgttcaggctcccgtcttcgtcaggaagattttccacctcgcattgttgaacacccttcagacctgattgtctcaaaaggagaacctgcaactttgaactgcaaagctgaaggccgccccacacccactattgaatggtacaaagggggagagagagtggagacagacaaagatgaccctcgctcacaccgaatgttgctgccgagtggatctttatttttcttacgtatagtacatggacggaaaagtagacctgatgaaggagtctatgtctgtgtagcaaggaattaccttggagaggctgtgagccacaatgcatcgctggaagtagccatacttcgggatgacttcagacaaaacccttcggatgtcatggttgcagtaggagagcctgcagtaatggaatgccaacctccacgaggccatcctgagcccaccatttcatggaagaaagatggctctccactggatgataaagatgaaagaataactatacgaggaggaaagctcatgatcacttacacccgtaaaagtgacgctggcaaatatgtttgtgttggtaccaatatggttggggaacgtgagagtgaagtagccgagctgactgtcttagagagaccatcatttgtgaagagacccagtaacttggcagtaactgtggatgacagtgcagaatttaaatgtgaggcccgaggtgaccctgtacctacagtacgatggaggaaagatgatggagagctgcccaaatccagatatgaaatccgagatgatcataccttgaaaattaggaaggtgacagctggtgacatgggttcatacacttgtgttgcagaaaatatggtgggcaaagctgaagcatctgctactctgactgttcaagttgggtctgaacctccacattttgttgtgaaaccccgtgaccaggttgttgctttgggacggactgtaacttttcagtgtgaagcaaccggaaatcctcaaccagctattttctggaggagagaagggagtcagaatctacttttctcatatcaaccaccacagtcatccagccgattttcagtctcccagactggcgacctcacaattactaatgtccagcgatctgatgttggttattacatctgccagactttaaatgttgctggaagcatcatcacaaaggcatatttggaagttacagatgtgattgcagatcggcctcccccagttattcgacaaggtcctgtgaatcagactgtagccgtggatggcactttcgtcctcagctgtgtggccacaggcagtccagtgcccaccattctgtggagaaaggatggagtcctcgtttcaacccaagactctcgaatcaaacagttggagaatggagtactgcagatccgatatgctaagctgggtgatactggtcggtacacctgcattgcatcaacccccagtggtgaagcaacatggagtgcttacattgaagttcaagaatttggagttccagttcagcctccaagacctactgacccaaatttaatccctagtgccccatcaaaacctgaagtgacagatgtcagcagaaatacagtcacattatcatggcaaccaaatttgaattcaggagcaactccaacatcttatattatagaagccttcagccatgcatctggtagcagctggcagaccgtagcagagaatgtgaaaacagaaacatctgccattaaaggactcaaacctaatgcaatttaccttttccttgtgagggcagctaatgcatatggaattagtgatccaagccaaatatcagatccagtgaaaacacaagatgtcctaccaacaagtcagggggtggaccacaagcaggtccagagagagctgggaaatgctgttctgcacctccacaaccccaccgtcctttcttcctcttccatcgaagtgcactggacagtagatcaacagtctcagtatatacaaggatataaaattctctatcggccatctggagccaaccacggagaatcagactggttagtttttgaagtgaggacgccagccaaaaacagtgtggtaatccctgatctcagaaagggagtcaactatgaaattaaggctcgccctttttttaatgaatttcaaggagcagatagtgaaatcaagtttgccaaaaccctggaagaaggcaagtatgatgaagcgtttgatttccatgcattgcagtatatttgttagaattttattagcttaatttaaattgttataatgttaatagtggcattaattactaactttcttgatattgaacatacattttgctaacagtatttgtttatttagaaaactagaaaagcaaaatgctataatagttgacttgcttcaatagtggcctacctcaaatgtgtaaatgtgaacattatattacttaatggcatatagaaatttaattattcagaactaaaattcacatttaaaaatgaaattgttttccgtttggtttattttccattcagcattttctatttgtttattttgatccatgatttgaataatgtgttgatttgcccaggacttcgtgggattagcattttcttcctaaatctcatctcttttaaaacacctcagttctagacaaatcactatagctgaccaccctattcctagaaattaaacaatatttacataaaggtaaaagattacattaactaacaacaggatttttcccaacatgtctttgtcactttggctgtataagtaattatcatgaatgattaatattcattttcatacttttgaacatttcgggggagaacatgagactagagttacacggtagaagaaataggaattgtcctgggatgtttggtggaaacaaggtatttaactttggttatggaaaattcaccgtggcagtgaattagcattgagtgaggaacaacttaggtagtttgggactattcagacttggatgagatacatctttaaaacatatgcagctgggcacagtggctcacgcctgtaaccccagcactttaggaggctgaggcgggcggatcacctgaagtcacgagttcgagaccagcctggccaaggcggtgaaaccccatctctattaaaaatacaaaaattagtggggcatggtggtgggtgcctgtaatcccagctactcagggggctgaggcaggagaatcgcttgaacccgggagggggaggttgcagtgagccgagatcatgtcacagcactacagcctagatgacagagcgagcctccgtctcaaaaaaaaaaaaaaaaaaaaagggcggccgc

SEQ ID NO: 57 - protein, 753 aa, Homo Sapiens [sequence omitted]

SEQ ID NO: 58 - DNA, 2259 bp, Homo Sapiens
atgattgcggagcccgctcacttttacctgtttggattaatatgtctctgttcaggctcccgtcttcgtcaggaagattttccacctcgcattgttgaacacccttcagacctgattgtctcaaaaggagaacctgcaactttgaactgcaaagctgaaggccgccccacacccactattgaatggtacaaagggggagagagagtggagacagacaaagatgaccctcgctcacaccgaatgttgctgccgagtggatctttatttttcttacgtatagtacatggacggaaaagtagacctgatgaaggagtctatgtctgtgtagcaaggaattaccttggagaggctgtgagccacaatgcatcgctggaagtagccatacttcgggatgacttcagacaaaacccttcggatgtcatggttgcagtaggagagcctgcagtaatggaatgccaacctccacgaggccatcctgagcccaccatttcatggaagaaagatggctctccactggatgataaagatgaaagaataactatacgaggaggaaagctcatgatcacttacacccgtaaaagtgacgctggcaaatatgtttgtgttggtaccaatatggttggggaacgtgagagtgaagtagccgagctgactgtcttagagagaccatcatttgtgaagagacccagtaacttggcagtaactgtggatgacagtgcagaatttaaatgtgaggcccgaggtgaccctgtacctacagtacgatggaggaaagatgatggagagctgcccaaatccagatatgaaatccgagatgatcataccttgaaaattaggaaggtgacagctggtgacatgggttcatacacttgtgttgcagaaaatatggtgggcaaagctgaagcatctgctactctgactgttcaagttgggtctgaacctccacattttgttgtgaaaccccgtgaccaggttgttgctttgggacggactgtaacttttcagtgtgaagcaaccggaaatcctcaaccagctattttctggaggagagaagggagtcagaatctacttttctcatatcaaccaccacagtcatccagccgattttcagtctcccagactggcgacctcacaattactaatgtccagcgatctgatgttggttattacatctgccagactttaaatgttgctggaagcatcatcacaaaggcatatttggaagttacagatgtgattgcagatcggcctcccccagttattcgacaaggtcctgtgaatcagactgtagccgtggatggcactttcgtcctcagctgtgtggccacaggcagtccagtgcccaccattctgtggagaaaggatggagtcctcgtttcaacccaagactctcgaatcaaacagttggagaatggagtactgcagatccgatatgctaagctgggtgatactggtcggtacacctgcattgcatcaacccccagtggtgaagcaacatggagtgcttacattgaagttcaagaatttggagttccagttcagcctccaagacctactgacccaaatttaatccctagtgccccatcaaaacctgaagtgacagatgtcagcagaaatacagtcacattatcatggcaaccaaatttgaattcaggagcaactccaacatcttatattatagaagccttcagccatgcatctggtagcagctggcagaccgtagcagagaatgtgaaaacagaaacatctgccattaaaggactcaaacctaatgcaatttaccttttccttgtgagggcagctaatgcatatggaattagtgatccaagccaaatatcagatccagtgaaaacacaagatgtcctaccaacaagtcagggggtggaccacaagcaggtccagagagagctgggaaatgctgttctgcacctccacaaccccaccgtcctttcttcctcttccatcgaagtgcactggacagtagatcaacagtctcagtatatacaaggatataaaattctctatcggccatctggagccaaccacggagaatcagactggttagtttttgaagtgaggacgccagccaaaaacagtgtggtaatccctgatctcagaaagggagtcaactatgaaattaaggctcgccctttttttaatgaatttcaaggagcagatagtgaaatcaagtttgccaaaaccctggaagaaggcaagtatgatgaagcgtttgatttccatgcattgcagtatatttgt

SEQ ID NO: 59 - protein, 85 aa, Homo Sapiens
PSAPSKPEVTDVSRNTVLSWQPNLNSGATPTSYIIEAFSHASGSSWQTVAENVKTETSAIKGLKPNAIYLFLVRAANAYGISDPS

SEQ ID NO: 60 - protein, 90 aa, Homo Sapiens
GNAVLHLHNPTVLSSSSIEVHWTVDQQSQYIQGYKILYRPSGANHGESDWLVFEVRTPAKNSVVIPDLRKGVNYEIKARPFFNEFQGADS

SEQ ID NO: 61 - protein, 68 aa, Homo Sapiens
GEPATLNCKAEGRPTPTIEWYKGGERVETDKDDPRSHRMLLPSGSLFFLRIVHGRKSRPDEGVYVCVA

SEQ ID NO: 62 - protein, 59 aa, Homo Sapiens
GEPAVMECQPPRGHPEPTISWKKDGSPLDDKDERITIRGGKLMITYTRKSDAGKYVCVG

SEQ ID NO: 63 - protein, 57 aa, Homo Sapiens
DDSAEFKCEARGDPVPTVRWRKDDGELPKSRYEIRDDHTLKIRKVTAGDMGSYTCVA

SEQ ID NO: 64 - protein, 66 aa, Homo Sapiens
GRTVTFQCEATGNPQPAIFWRREGSQNLLFSYQPPQSSSRFSVSQTGDLTITNVQRSDVGYYICQT

SEQ ID NO: 65 - protein, 59 aa, Homo Sapiens
DGTFVLSCVATGSPVPTILWRKDGVLVSTQDSRIKQLENGVLQIRYAKLGDTGRYTCVA

SEQ ID NO: 66 - DNA, 2122 bp, Homo Sapiens
  CDS (1)..(1047)
ccacgcgtccgccggagcgctcgcccagccgccgcctccaagcccctgaggtttccggggaccacaatgaacaagttgctgtgctgcgcgctcgtgtttctggacatctccattaagtggaccacccaggaaacgtttcctccaaagtaccttcattatgacgaagaaacctctcatcagctgttgtgtgacaaatgtcctcctggtacctacctaaaacaacactgtacagcaaagtggaagaccgtgtgcgccccttgccctgaccactactacacagacagctggcacaccagtgacgagtgtctatactgcagccccgtgtgcaaggagctgcagtacgtcaagcaggagtgcaatcgcacccacaaccgcgtgtgcgaatgcaaggaagggcgctaccttgagatagagttctgcttgaaacataggagctgccctcctggatttggagtggtgcaagctggaaccccagagcgaaatacagtttgcaaaagatgtccagatgggttcttctcaaatgagacgtcatctaaagcaccctgtagaaaacacacaaattgcagtgtctttggtctcctgctaactcagaaaggaaatgcaacacacgacaacatatgttccggaaacagtgaatcaactcaaaaatgtggaatagatgttaccctgtgtgaggaggcattcttcaggtttgctgttcctacaaagtttacgcctaactggcttagtgtcttggtagacaatttgcctggcaccaaagtaaacgcagagagtgtagagaggataaaacggcaacacagctcacaagaacagactttccagctgctgaagttatggaaacatcaaaacaaagaccaagatatagtccagaagatcatccaagatattgacctctgtgaaaacagcgtgcagcggcacattggacatgctaacctcaccttcgagcagcttcgtagcttgatggaaagcttaccggggaaagaaagtgggagcaggaaggacattggaaaaaacaataaaggcatgcaaacccagtggaccagatcctgaagctgctcagtttgtggcgaataaaaaatggcgaccaagacaccttgaagggcctaatgcacgcactaaagcactcaaagacgtaccactttcccaaaactgtcactcagagtctaaagaagaccatcaggttccttcacagcttcacaatgtacaaattgtatcagaagttatttttagaaatgataggtaaccaggtccaatcagtaaaaataagctgcttataactggaaatggccattgagctgtttcctcacaattggcgagatccccatggatgagtaaactgtttctcaggcacttgaggctttcagtgatatctttctcattaccagtgactaattttgccacagggtactaaaagaaactatgatgtggagaaaggactaacatctcctccaataaaccccaaatggttaatccaactgtcagatctggatcgttatctactgactatattttcccttattactgcttgcagtaattcaactggaaattaaaaaaaaaaaactagactccattgtgccttactaaatatgggaatgtctaacttaaatagctttgagatttcagctatgctagaggcttttattagaaagccatatttttttctgtaaaagttactaatatatctgtaacactattacagtattgctatttatattcattcagatataagatttgtacatattatcatcctataaagaaacggtatgacttaattttagaaagaaaattatattctgtttattatgacaaatgaaagagaaaatatatatttttaatggaaagtttgtagcatttttctaataggtactgccatatttttctgtgtggagtatttttataattttatctgtataagctgtaatatcattttatagaaaatgcattatttagtcaattgtttaatgttggaaaacatatgaaatataaattatctgaatattagatgctctgagaaattgaatgtaccttatttaaaagattttatggttttataactatataaatgacattattaaagttttcaaattatttttaaaaaaaaaaaaaaaaaaaaaaaaaaaaa

SEQ ID NO: 67 - protein, 349 aa, Homo Sapiens
PRVRRSARPAAASKPLRFPGTTMNKLLCCALVFLDISIKWTTQETFPPKYLHYDEETSHQLLCDKCPPGTYLKQHCTAKWKTVCAPCPDHYYTDSWHTSDECLYCSPVCKELQYVKQECNRTHNRVCECKEGRYLEIEFCLKHRSCPPGFGVVQAGTPERNTVCKRCPDGFFSNETSSKAPCRKHTNCSVFGLLLTQKGNATHDNICSGNSESTQKCGIDVTLCEEAFFRFAVPTKFTPNWLSVLVDNLPGTKVNAESVERIKRQHSSQEQTFQLLKLWKHQNKDQDIVQKIIQDIDLCENSVQRHIGHANLTFEQLRSLMESLPGKESGSRKDIGKNNKGMQTQWTRS

SEQ ID NO: 68 - protein, 84 aa, Homo Sapiens
PSPPRNLRVTDITPTSITVSWTPPEGNGPITGYRIQYRWPVNDNEWNEFNVPRTTNSYTITNLRPGTEYEFRVQAVNGDGGPWS

SEQ ID NO: 69 - protein, 47 aa, Homo Sapiens
GQSVTLTCMVSFHPQDYTIWWYRNGGPITLTINSWQVEDSGTYWCMV

SEQ ID NO: 70 - protein, 1650 aa, Homo Sapiens
MKWKHVPFLVMISLLSLSPNHLFLAQLIPDPEDVERGNDHGTPIPTSDNDDNSLGYTGSRLRQEDFPPRIVEHPSDLIVSKGEPATLNCKAEGRPTPTIEWYKGGERVETDKDDPRSHRMLLPSGSLFFLRIVHGRKSRPDEGVYVCVARNYLGEAVSHNASLEVAILRDDFRQNPSDVMVAVGEPAVMECQPPRGHPEPTISWKKDGSPLDDKDERITIRGGKLMITYTRKSDAGKYVCVGTNMVGERESEVAELTVLERPSFVKRPSNLAVTDDSAEFKCEARGDPVPTVRWRKDDGELPKSRYEIRDDHTLKIRKVTAGDMGSYTCVAENMVGKAEASATLTVQEPPHFVVKPRDQVVALGRTVTFQCEATGNPQPAIFWRREGSQNLLFSYQPPQSSSRFSVSQTGDLTITNVQRSDVGYYICQTLNVAGSIITKAYLEVTDVIADRPPPVIRQGPVNQTVAVDGTFVLSCVATGSPVPTILWRKDGVLVSTQDSRIKQLENGVLQIRYAKLGDTGRYTCIASTPSGEATWSAYIEVQEFGVPVQPPRPTDPNLIPSAPSKPEVTDVSRNTVTLSWQPNLNSGATPTSYIIEAFSHASGSSWQTVAENVKTETSAIKGLKPNAIYLFLVRAANAYGISDPSQISDPVKTQDVLPTSQGVDHKQVQRELGNAVLHLHNPTVLSSSSIEVHWTVDQQSQYIQGYKILYRPSGANHGESDWLVFEVRTPAKNSVVIPDLRKGVNYEIKARPFFNEFQGADSEIKFAKTLEEAPSAPPQGVTVSKNDGNGTAILVSWQPPPEDTQNGMVQEYKVWCLGNETRYHINKTVDGSTFSVVIPFLVPGIRYSVEVAASTGAGSGVKSEPQFIQLDAHGNPVSPEDQVSLAQQISDVVKQPAFIAGIGAACWIILMVFSIWLYRHRKKRNGLTSTYAGIRKVPSFTFTPTVTYERGGEAVSSGGRPGLLNISEPAAQPWLADTWPNTGNNHNDCSISCCTAGNGNSDSNLTTYSRPADCIANYNNQLDNKQTNLMLPESTVYGDVDLSNKINEMKTFNSPNLKDGRFVNPSGQPTPYATTQLIQSNLSNNMNNGSGDSGEKHWKPLGQQKQEVAPVQYNIVEQNKLNKDYRANDTVPPTIPYNQSYDQNTGGSYNSSDRGSSTSGSQGHKKGARTPKVPKQGGMNWADLLPPPPAHPPPHSNSEEYNISVDESYDQEMPCPVPPARMYLQQDELEEEEDERGPTPPVRGAASSPAAVSYSHQSTATLTPSPQEELQPMLQDCPEETGHMQHQPDRRRQPVSPPPPPRPISPPHTYGYISGPLVSDMDTDAPEEEEDEADMEVAKMQTRRLLLRGLEQTPASSVGDLESSVTGSMINGWGSASEEDNISSGRSSVSSSDGSFFTDADFAQAVAAAAEYAGLKVARRQMQDAAGRRHFHASQCPRPTSPVSTDSNMSAAVMQKTRPAKKLKHQPGHLRRETYTDDLPPPPVPPPAIKSPTAQSKTQLEVRPVVVPKLPSMDARTDRSSDRKGSSYKGREVLDGRQVVDMRTNPGDPREAQEQQNDGKGRGNKAAKRDLPPAKTHLIQEDILPYCRPTFPTSNNPRDPSSSSSMSSRGSGSRQREQANVGRRNIAEMQVLGGYERGEDNNEELEETES

SEQ ID NO: 71 - DNA, 989 bp, Homo Sapiens
  CDS (356)..(889)
gtcgacccacgcgtccgcagacgtctacctgggggtcccgtctgcgctcccgggatggaaaacgcccaggggaaacttaggcaggcgagcggacgggcacctcccgcgggacgaactcactcggtggcctcctacttccccggccgtgttccaacgcctgagaataacgggaacagcggtcgtactcaccgacagcggcagcagcggcctctctcaattgggcaaagcactccagaccttttggaagagtgacaccaaaggcaagcacctgcttggcaggcccctcagcttctacgcaagtataagtcttggacttcattccattttctgttgagtaataaactcaacgttgaaaatgtcctttgtgggggagaactcaggagtgaaaatgggctctgaggactgggaaaaagatgaaccccagtgctgcttagaagacccggctggaagccccctggaaccaggcccaagcctccccaccatgaattttgttcacacaaagatcttctttgcattagcctcatccttgagctcagcctctgcggagaaaggaagtccgattctcctgggggtctctaaaggggagttttgtctctactgtgacaaggataaaggacaaagtcatccatcccttcagctgaagaaggagaaactgatgaagctggctgcccaaaaggaatcagcacgccggcccttcatcttttatagggctcaggtgggctcctggaacatgctggagtcggcggctcaccccggatggttcatctgcacctcctgcaattgtaatgagcctgttggggtgacagataaatttgagaacaggaaacacattgaattttcatttcaaccagtttgcaaagctgaaatgagccccagtgaggtcagcgattaggaaactgccccattgaacgccttcctcgctaatttgaactaattgtataaaaacaccaaacctgctcactaaaaaaaaaaaaaaaaagggcggccgc

SEQ ID NO: 72 - protein, 178 aa, Homo Sapiens
MSFVGENSGVKMGSEDWEKDEPQCCLEDPAGSPLEPGPSLPTMNFVHTKIFFALASSLSSASAEKGSPILLGVSKGEFCLYCDKDKGQSHPSLQLKKEKLMKLAAQKESARRPFIFYRAQVGSWNMLESAAHPGWFICTSCNCNEPVGVTDKFENRKHIEFSFQPVCKAEMSPSEVSD

SEQ ID NO: 73 - DNA, 534 bp, Homo Sapiens
atgtcctttgtgggggagaactcaggagtgaaaatgggctctgaggactgggaaaaagatgaaccccagtgctgcttagaagacccggctggaagccccctggaaccaggcccaagcctccccaccatgaattttgttcacacaaagatcttctttgcattagcctcatccttgagctcagcctctgcggagaaaggaagtccgattctcctgggggtctctaaaggggagttttgtctctactgtgacaaggataaaggacaaagtcatccatcccttcagctgaagaaggagaaactgatgaagctggctgcccaaaaggaatcagcacgccggcccttcatcttttatagggctcaggtgggctcctggaacatgctggagtcggcggctcaccccggatggttcatctgcacctcctgcaattgtaatgagcctgttggggtgacagataaatttgagaacaggaaacacattgaattttcatttcaaccagtttgcaaagctgaaatgagccccagtgaggtcagcgat

SEQ ID NO: 74 - protein, 63 aa, Homo Sapiens
MSFVGENSGVKMGSEDWEKDEPQCCLEDPAGSPLEPGPSLPTMNFVHTKIFFALASSLSSASA

SEQ ID NO: 75 - protein, 115 aa, Homo Sapiens
EKGSPILLGVSKGEFCLYCDKDKGQSHPSLQLKKEKLMKLAAQKESARRPFIFYRAQVGSWNMLESAAHPGWFICTSCNCNEPVGVTDKFENRKHIEFSFQPVCKAEMSPSEVSD

SEQ ID NO: 76 - DNA, 501 bp, Homo Sapiens
  CDS (1)..(501)
atgggctctgaggactgggaaaaagatgaaccccagtgctgcttagaagacccggctggaagccccctggaaccaggcccaagcctccccaccatgaattttgttcacacaaagatcttctttgcattagcctcatccttgagctcagcctctgcggagaaaggaagtccgattctcctgggggtctctaaaggggagttttgtctctactgtgacaaggataaaggacaaagtcatccatcccttcagctgaagaaggagaaactgatgaagctggctgcccaaaaggaatcagcacgccggcccttcatcttttatagggctcaggtgggctcctggaacatgctggagtcggcggctcaccccggatggttcatctgcacctcctgcaattgtaatgagcctgttggggtgacagataaatttgagaacaggaaacacattgaattttcatttcaaccagtttgcaaagctgaaatgagccccagtgaggtcagcgat

SEQ ID NO: 77 - protein, 167 aa, Homo Sapiens
MGSEDWEKDEPQCCLEDPAGSPLEPGPSLPTMNFVHTKIFFALASSLSSASAEKGSPILLGVSKGEFCLYCDKDKGQSHPSLQLKKEKLMKLAAQKESARRPFIFYRAQVGSWNMLESAAHPGWFICTSCNCNEPVGVTDKFENRKHIEFSFQPVCKAEMSPSEVSD

SEQ ID NO: 78 - protein, 52 aa, Homo Sapiens
MGSEDWEKDEPQCCLEDPAGSPLEPGPSLPTMNFVHTKIFFALASSLSSASA

SEQ ID NO: 79 - protein, 115 aa, Homo Sapiens; identical to SEQ ID NO: 75

SEQ ID NO: 80 - DNA, 408 bp, Homo Sapiens
  CDS (1)..(408)
atgaattttgttcacacaaagatcttctttgcattagcctcatccttgagctcagcctctgcggagaaaggaagtccgattctcctgggggtctctaaaggggagttttgtctctactgtgacaaggataaaggacaaagtcatccatcccttcagctgaagaaggagaaactgatgaagctggctgcccaaaaggaatcagcacgccggcccttcatcttttatagggctcaggtgggctcctggaacatgctggagtcggcggctcaccccggatggttcatctgcacctcctgcaattgtaatgagcctgttggggtgacagataaatttgagaacaggaaacacattgaattttcatttcaaccagtttgcaaagctgaaatgagccccagtgaggtcagcgat

SEQ ID NO: 81 - protein, 136 aa, Homo Sapiens
MNFVHTKIFFALASSLSSASAEKGSPILLGVSKGEFCLYCDKDKGQSHPSLQLKKEKLMKLAAQKESARRPFIFYRAQVGSWNMLESAAHPGWFICTSCNCNEPVGVTDKFENRKHIEFSFQPVCKAEMSPSEVSD

SEQ ID NO: 82 - protein, 21 aa, Homo Sapiens
MNFVHTKIFFALASSLSSASA

SEQ ID NO: 83 - protein, 115 aa, Homo Sapiens; identical to SEQ ID NO: 75

SEQ ID NO: 84 - protein, 177 aa, Homo Sapiens
MEICRGLRSHLITLLLFLFHSETICRPSGRKSSKMQAFRIWDVNQKTFYLRNNQLVAGYLQGPNVNLEEKIDVVPIEPHALFLGIHGGKMCLSCVKSGDETRLQLEAVNITDLSENRKQDKRFAFIRSDSGPTTSFESAACPGWFLCTAMEADQPVSLTNMPDEGVMVTKFYFQEDE

SEQ ID NO: 85 - protein, 153 aa, Homo Sapiens
APVRSLNCTLRDSQQKSLVMSGPYELKALHLQGQDMEQQVVFSMSFVQGEESNDKIPVALGLKEKNLYLSCVLKDDKPTLQLESVDPKNYPKKKMEKRFVFNKIEINNKLEFESAQFPNWYISTSQAENMPVFLGGTKGGQDITDFTMQFVSS

SEQ ID NO: 86 - DNA, 152331 bp, Homo Sapiens
  misc_feature (1)..(152331): n = A,T,C or G
gaagtgaagatataatgtatagtagtaatatataatgttaggtgaattaaaggaaatagaatatattggggagtaattatgggtgtaaagaaatatagtagggaagtatttagatttgagaaaaaaaaaaaggaatttagtgtaggtgaanaataaaagnanaaggttaaaaattaaaaaaaaattaaatataaataaataaataaaaataaaaataaaataaaaaatttaaaaaattaaaaaaatataaaaaataaagaaatggaagtggattcttagaaaaaaaagaaagtaaggtgatatgaggagatagagaggatgtggtgtgagatgattggtttaattagaaaataggttttgaatagagtgggaaagtagagttttggtaaatgtggggggaagagggtaatgttgtttgagtgaaagaaaaaatggtatatttttataaaataatgaggaaagtgtgtgaaaaaaaaattattgggatttgggaaggtgatatataaagttgtggaaaatttggggggtggggtttatttaggattaaaaagttatttaaagaatgaaaatgaatttttgtttgtaatttggggataagaaattaatgtttagaaagaaagggaaaaaattgaagaaaaaaatttagattttggaaatttaaaaatattgtgggtgtaaataggaaggatttttaaaggtaattgtggaagggatttgtgtggaaaataatagggagaaaaaatgggggcatctaactggagcctgcattattacagatttagcatcaccaaagtctaaacaattagactgactaaggcagaactgcccttatgacagcagacataagaaggaaaaggccaaaacactgtgttaaaaattatccaaatgtgaggaaaaggcaaagagagtaggtgtgcctttttagtgtctaagctgcctgcccaaggggcatctgatgctctcaggcaggagtccacaaatttttttttgtaaaagatcagatagtaaatcttttcagcgtgaagagcatgaggtctctgtcacaaatactcaaccaccattacaacatgaaagcagccaacagacaacacatgacaaatgagtgtggctgtgttccagtaaatcttgattacaaaaacaggcaagaggccagagctgacccatgggccatagtttgctgaccccttctgtaaaggaaagtatttttgtttgacttgctgtttaccattgattgaacacaaggctctgtaaagttacttgttaacttgcagaagattgatgagtggcaagtaatttttattcaccagaatataaaattatttctgttcagtagaaaagataaaccaactgtgatattatggtcctgggggtgtctgtctaccatgtgctcgcagttctgtaataaatgttctctcaagatccttaaaatctcttggaaattataaaaatattggaaagagaagaacagtttttaaaatatatatatatatatatattttttttgagatggagtcttgctctgtcgtccaggctggagtgcagtggcgcaaacttggttcaccacaacctctgcctcccgggttcaagcgattcttctgcctcagcctcctgagtagctgggactacaggcgcccgccaccacgcccagctaatttttgtatttttagtagagacgaggttttactatgttggctaggctggtctcaaactcctgaccttgtgatctgcccgccttggcctcccaaagtgctgggattacaggtgtgagccactgcacctggccagttttttaaatatatttttaaaaacacttgaataagagtcagtgtaaactagaagtttaaaaatgcttcacagaacacccagggtttacattacaagattctcacaacaaacctattgtaaaggtgagtaaggcatgttattacagagaaaagtttgggagcaaaactgtaaaaaattatatttttgttgtattttctaagagaaagagtattgttatgttctcctaacctctgttgattactactttaagtgatttccttgagagcacatgatgatccgccgttcatagaaaactgaaagcaataagatgactaggtaagcatgacatttaaaaggtattcatgggacgtggttacaaaaccaactcacaactaaaaagtcttaggacctctcgctgacttaggagcctgatcccaactctgagaatgactcagtgtgttaccctgtggctagtgtagaccaatgatcctgtctcagagtcactagccaacagcccatatcaagtacttgaaactttgactcagaaacctcagtgtcagaacctttgacctaggaaccacctgtagtggttaactgcaatttgcaccccttagttcagggctttacaacaccgggggcggggaggggaaaggcatananctgatgacctaaaggaaacccattgcagcaacgcttttgtgttaagtgtacaaataagtgttgttttagaatcctccaggtaatgcctttgttatttaatgtgtctgagacaattctgcacattaaagaatataaaatattaccttgtaattccaatttgaaatgtgtaattgacattagacttctatttgaatttgaaatgtctaaaacaatgtggttaagtttgtaaaaggtgtgtgaattttgagtctgatttactacatttttttttaattttctttttttttggagttttagggattgcttagatggctagaaagattttattcatcagatttttaagtctgccttggcaggcacttgcagtgtttgaaagaatcagatatatcaaatttgtagtttaaaatatttaagggaactcaattaactatgctagaaaagagaattaagtatttaggaggatttaatatggtgtgaaagttgtgaaaatcaaaatggagacactaatgttaagaaaaccctgataaatggaaccagggaaaggcatgaagatagagttctcacacttgtatccctgatcatgaaaaagatctgcgggtttttccgcgtttttacccgaaatcttcaagggatgggaaaaagaaaattgctaaaaaatctcggttttttggttttaacagatatttacaccntggatcccatttattatgttgtccccaaggttttcggtgggttcccaatcagttagcccccctccacagtgaaagcactttactttatcaccttcacctaaagcataaaatccagctcttgaaagctgctccttgttaactgaatatatccacatcccaaaagtaatgatccatgcttcataatctgccacggatggatggatggatggatggatggatggatggatggatgaatggatggattgatttcttggaggatttgttgaatttgggaaattccacgccaggacagctggcccaaactgcccgcgacaatctgctcggtacaaggggagggtcctggagagggtgcggcccgagccccagtttggaaatgccaacttggctctgcagccgggccttagccacttgggtctggcgtccctccattattagcgccatgccggctcggggtgctgccaagtccctgagagcacaagcccgcgctcaagaaaagctgaagtgtgaatgttctgtctaccttcacagtaaatgctaagagaatgacccaagagcagagggtatcactctgctacggaggattgattgtaactggctctcctgccttagcaagaaatgccagaaccatggtcattcaagttcttgaccaaaaactgccttcatgagaatcaacttccccaagaaaaaaaaagcagaaacaggcaaagcttccagcatggtaggtaatactgacccttcttccctccttcctttggagattcacacagtaataatgcataaagctttgccaatggactaagcactgcccaggggtttttgtcatgcctggactgaaatgctctttttgcgttatcatagaatcccagtgcagtctgagtagactctaagcaaaagggacatttttcaaaaaggctttaaattgctagtacaaagaaggcaacaaaacttgcgtaactgtggacagattaactcacttggtgttttggctcttcagttttcccttggctgcgaagtactcctgaagctttctctgcggctcttcctgcaagcaggcaagcaaaaaaacgactgaactttatttcgagatgaagagccgctaacttgctgtagtgataaggaatgaactaaggctagggacatattaacatccgctggtggtgactctttagcctagatcttaccccactcctgctccttccatatggttcggtctcaggctcactaccgatcaatggcgtactaaaagcactaactatagactccaacacgtctgtcgtgtgtttcacgacaagccgtggagttaatccctctgacagtagctcagataaggatgggctatcatgggcccggaactggggcatgacgctcgtcaccaacgcatgagctccccaagtatgctatacctgtccctatgaagggcttccaactctatgtgcagtccccatgtggagagtcaggtattgattgatcaagccaggggtgtggtgaatggggagcttcctacaggggtaatgataattgaaatgcacggtgatggggattttcatattggtctcctaaggagataacagattggatgcggggtcgatattccactgcccagggtgtgtaccgagggtatctgcaggtggatctcctccccacgtttgattaatactcctgtcttgggaagcatagacgggcgggggaaatgatgaagggtgaccactccccgggaacgcagtgctctgtacgatggccttgattgcgaattcctgcagggggggggcaagagatttaatattcattccatcttcatttggaagatgaaaaattggggaccagagaggggaggggactgggccaagttttcaaagaaaagtcagtaggaattgtgaattcctgggggccggggcccattagtgctgttttggatcagtaaatggagatgtgagtttcaacagtaacagggacattttaaaattaaaatgatttaacctttagaaaatgtcctattttgtaataatgatggattcacaggaaggtacaaagaaatgtccagagagttcntgagcccccttcagccagcttcttccaatgttaacatcttgcattattatagtacaacatcaaaactgggaaatcgatattggtactgtccagatagcttactcagattttgccagttatacttccactcatttgtgtgtgtgtgtgtgtgtgtgtgtgtgtgtgtgtgtgtgtagctctatgcaattttatgtgtgtagcttcatgtaaccaccacaatcacaatacttaactatgccctcatcacaagactctctcttgctatgctttacagctgtatcctcttcatctccaaaccctaagcccacctcaccgcctccaccatctctaatccctggcaaccactattctgtgctccatctctgtaattaattgtgttaattaatgttatacaaatggaatcatgaagtatgtgtcctttgagattgggctgttaatttttcactcagcacaatttccgtgagtctaatccaacttgtgtgtagcagtaattctttccttattattgctgaataatatgccatggtatggatgtatcacagtgtgtctaatcctttgcccattgaaaggaatttggataatttccaggttttggctattatgaataaagtgaacataagacatgtgtgtacaaattttggtgtgatcaaaagtctcatttctctgggataaatgcccggtaatgaaatggctgggttgtgtggggcaagaacacaggcgcgtattataaccttactaccaagacctgaacccatataaaggtttatgcgtaacaatcatcatccctgttccagaagattacacgtacgaccacgcctggctcaccgactcacgtgggccagtaccagaaattctcccaaacaaacagtcgtgtctgaaaacaatcgcggtgacctccacggttagaaaagcctgttttcaagtcctggaattgccacatattagctgggtaactttgggcatcacatttactctctccgaatttcagattgcaaaaactcattggattgttttgtggattgaaagaaataatgtaaatttaggccgagtgctttgacttacgcctgtaatcctatcactttgggaggccaaagcaggagggtcacttgagctcaggaatttgagaccacctctggcaacatagtgagatcctgtctctacaaaaaattttttttaaattatccagcatggtggtacacgcctgtattcccagctactcaggagactgaggtgtgaggattgctagaacctgggagatcaagtcaacagtgagccgtggttgtgccactgccctccaacctcagtgacagaggaagaccctgtctcaaaaaaaaaaaaaaaagtagtaagtttaaagaacttagtgtaggcctggcatataaatgatattgttgatgttgatgttagcttgaaggcacatttataggagtagggattttataacattatgagcctgagagcacatataatgttcccggtctaacatgctccaactgaagaaaccccacacttgtccggcaaggaaactactacagatttcctgacctactgtgcaattcggggcatgcgacgggactgtgtttctgggtacgctgtctcaggttcgtctgggatgtaagaattcaacttcagtagttctctcatagacgccgacgagaggggcgtctcttttctctgatgaatctgccagatcttccacttcatagagtctaaatcctccgattcgatctactggagacccccacgttacaaaaacgtctaacgtcggtgacagctccccacatagggaaagatcacctgagtctcactacctcacattagtgctatctccagccccatgctatctacgagatggtcacgcgaggtttaaggggtctccgattccggtggtccgattcagctaatcgtggccctacgtgaacgatcactcctgctcgtaacatcgatacagggtcgcgctgacaaatggtactacgtaggttctcaggtcaatgccgcgtcacgaatgagcctaactaccccataagtgcacgtactgtgttacctttcctgttcggccaaacctgctactgtatgctgtgcttgtttaggctccatgtgctctagcctgattatcttttcaagtgttttatttgctaatctataaggcccctttcgtaaaatgttcactcattttctaattagatattttttttaatgttgagttttgagagttctttagatattttagatacaagtccattgtcaaatatgtgatttacaaatattttctctcaatctgtaatttagttttcatcctcttaacagggtcttttggagagcaaataatttgattttcataaggttcaaattattaattttttcttgtatagttcacacttctagtgttaagtctaaaaactgtgccttgtcataggtaccaaaggttttctccagttttttttctagaagtttagagtttcatgttttacattggagtccatgatccattgttaattaatttttgtatataggtagatgtttaggtttagggtttttttaaaaaaaaattacatatgtttaattgctccagttccctttcattgaaaagggtatccttcctccattgaattgcctttgtcagaaattaattggacatatttgtgtgagtctatttctgggctctttatcatgttacttttaaaaaatgcatcagttcctccaccaatacctcattgtcttgattattgcagttatatagtaagccttagcattaggaaaagtgtttttcctgctttattctttntcaaaaaatttttggatattctagggcctttacatataaattttaaaataactttgtctatgtctaaccgaaagccttatgaagattttgataagaattgcattatgcctatacattaatttaaaaagaactgatgtctttattcagttgattctgctaatctatgaacatagcatctctctcaaagcatttagtctttctttaatttctgtcattaattttttaaaattttcatcctaaagattctgtatatgttttgttgaatttatgcttaagcatttcactttcttggtaacaattataaatgattttgtgttttttattccactagttcattttcagtgtgtagaaaagcaatgaatttttgtgtgttgatctttgttcctacatcttgcaacattattgaactcatttattagttctaggaggttttttcatttttcttgtagataccttgagattttctatatagacagtcatgttgtctgcaaacaggcacagttttatttcttccttttcaatctatatgcctttttttttttttttgccttattgcagtggctagaacttctagcactatgtcaaatagcattggtgaaagcagacatccttgttccttgtcttagaggaacatttggtctttaatcttggattgcggcgcctccttttctcttccaaaatttctcttgtctagttatttgtccagggaaatttgaaagctcacttactgtgcaagtcagcaggaaacaactgggtctgtgcacagcacctagcaaagttctgctctaggaattacactttggccctgaggtagatttctacaagaaccttaccttctaagcagcactggggttcatctttttcccagtcctcagagcccattttcactcctgagttctcccccacaaaggacattttcaacgttgagtttattactcaacagaaaatggaatgaagtccaagacctaaggagatagaaaggggaccagttatggcatcttctcaccccaggacaccttgctgcatgtctctagtgctgaacagaccactggccttgctctgtagtttgaaatgctcgctgcaaccagaaaggcaccaaggggccagaccatgctctcctgtctatcacgccttcaaagcagaatttcccaaaccttgagtcacagtgctaacacacggggtgccataacatttttgttgattttggcattttacaaaaataaaataaaaaagttaaaaatgcattgctctattcttggggctggcacactattgcctttggccaaatccggtccctgactgtttttttaaataaagttttattgaaacacaaccatgctcttgtgtacatattgtctcttggctgcttcgaagctacaatagtgttcgctttttaacacttacctaaaattactctgtaatccatggatccttaatttatttaaaaaactaatgttaatgagtagctttattttcctcccatctaatttaaggcccacagaacaccttcacttacctcaatcctctcccaacttacatgcttttaatgtcatatatgttaataccgtatacttttaaaactttctaaaatagcattattttatagcatgagtgttcatttacatttttgcatatatttagaattttctttgctcttcgtttcttcttctatttatgactcccctctgggatcattttccttctacttgaagtacatagtttagaactgcactattcaatacagtagccactagccatgtgtagctattgaagtttaaactaagtaaaattgagtaatattaaaaactcagttccttcatctcactagccacatttcaagtgctcagcagccacgtgcgactaatgactactgtacatcaaacatatagaacatttccatcatggcaaagagctctattgatagtgttcatccagagtttctgttccaggaccaaactgagggttgggctgctatttctcatggcccaataacaagatgcagatgagctggggaggaagagagtttttatttctgcnaccatttaccgggagaaggcctggaaatcatcaccaggccaactcaaaattattacgttttccagagcttatataccttctaagctatatgtctacgtgtaagtgtgcattcacctgaagacgttagtgattaacttcttttaatctgtaactaaggtctgagtccggaagatcttcccctggagcctcagtaaatttacttaatctaaatgggtccaggtgctggggtaattacccttatcttgtcccctgctaaatcatggaggtttggggattcctttagagcaccaataaacttgtttgtggaggcctgggggtttcttctgacccacaataaaacttgtttaatcctaaatgggtcctgttaagaattccttctttattttgtcatattttaaggcccagaaaaggcctgggcaaaactcttgatgggcttttgttacattccagcctttgtataagaacactggtttttaatatttaacttaaccatttagtcagtactgaaacagttgttatagagatctgcattagtgagacctggcctgccacatttccttttctgaagatcttatggtagtgatcacctttgtgaaaggaaaataaatcttgggacctcaaaatcactaagccaaagaaaaaagtcaagctgggaagaatctgacacttaaatccaacactgctaactcattcatctcactcattcattcattttattttcttttttctttctttttttttttttttttttgaaacgaagtcttgctctgtcacccaagctggagtgcagtggatctcaggtcactgcaacctccacctcccgggttcaagcgattctcctacctcagactcctgagtagctggaattacaggcacctgccaccacgcctggctaatttttatatttttagtagagacggggtttcaccatgttcatcaggctggtctcgaactcctgacctcgtgatccgcacccccctcggccttgtttgcttgaggtactgtctaaatgctggaactgaaaatggcaagcaagacatccctacccttgaggaaactgtaatctagtcggaaatacagatgtcaaccaagtctcacacaagaanattgtacaaaacccctaggaggaaaaacctatcaccgcctcctatggaacttaaaacaaaaagaaaagtaacaaaggaaatgaatatttcattctggaagaacattgaaaaagaacaggaagaagagaaagcacaactcgaactgtccactagaattgacaacactctgacagaatgtctgaacctcatcgaaggggtaagtgaaaaaaataagctcctccagctttggcccaaagtcttataatttttaaacatattcctaaatataatataggagagatagccttcatctaagtagaaatttagctactcttgtaaatacagagtaataataataatgacatgcccataaacagtgtcttttgtgtatctgtgcttttataagcacttagctaagattatctcacataattatcataaccactgttactatgaccactttacaaacaaaactgaggcacaaagaagttggaaaactaatccaaacaaactggctccaaaaggaactttgctttctttgggtatcaagttctgaagagtacacatttaacattgaaactgaggtcagaaggcaagtttctatgtaaagttggagtattctgaatactctgggtagctacaaatagtatttaaattttatcttggattctgcagataaggataaaatagatggtaggcaaagagtatgatccttaggagaaatttttcctgaaggaaaaatatattaataaaaaatgatggaataaacttctaagatccttgcctagagcaaaactcattcagtcctttggctggtaatgttgaacatcaacaaaaaaaaggaaaagttcagtttaagtctactccaggcaacattttcacaacatccagttaaatattaactatttctctttgtggaattgaactagagttctttttcttatcctcttttttggttgttgtattatttaaaaatgagtacctttttattattgaaatcatttcaagtaatgcagataaatgatcagccctctccctgtacaaacatacatacttaggcatcccaaacttctctctggaggtgaccaccattgccagtcattcattctgttttcatgcatgtccatacagtataggtatgtcgagaaatgaagtattatatttttgtgagttgcaattcttttattcacatttttgtgtactttggttgtcttttcttgtgttttcctagtaccaatgttatgctgacttaggcagatgagttgagtattttcctttttgccctataaactgaaaatagtttgtatgacatgagaattatttttattttttgaaggtttgataaaaacttgcccataaaaatcgtctggaccggtttcttgaggatgcctgtgttagagcccgctttaacctgggctaccaatggttcgtcaagttctagattctctattaatacctttttcttgtgtctttctctggtctgttttcagccccgagtctcttagatctgtcctctaatattcctattgactttacttcattttctaagtctttatccttttgctttactttccgagagacctgcttaaccttatctcccaactcttttattgaatttcatttcttttactatatattttttactttgaatacacctctctcttcctcacattttcccccatagtattttgtcttcaattgacagttctactatcttattactctggagatattaataatagtttttaaatttttatttatttttattttcaaaacagtgtcttactctgtcactcacgctggagtgcagtggtgtgatcatggatcactgcagccttgatctctgagctcaagctatcctcctgcttcagcctcccaagtagctggaaccacaggcatgtgtcaccatacccagctaatttttttgtttttgaggtggagtctcactctgtagcccggtctggagtgcagtggtgcaatctgggctcacagcaacctctgcctcctgggtcctggttcaagcaattctcctgcctcagcctcctgagtagctgggattacagaaacacactaccatgcccagctaatttttgtatttttgtagagacagggtttcaccatgttggccaggctggtcttgaactcctgaccttgtgatctgcccaccttggcctcccaaagtgctgggattacaggcgtgagccactgcacccggccactaatttttaaattgttaataaagacgaggtcttgctatgttgcccagtatggtcttgaactcctgggcttaagtaatcctcctgcctcagcctcccaaagtgttgggattacaggtgtgagccactgaatctgacattttttaaaagttttcttctctttaccaagtcttttttcccctttctgcttttttgggttgttttattttgatctctatcttgctagaaactttctgcagacgtttagtaatactagatttttgagagtgggcaactggaaagctgattggaaactctgaatacatgggtgaggcttgttggctgtgagtgtcattgcttgatgtcctggcaaggccaatgggtttgggacccctactattagtataggcctgattccctgggaaaggctcttttgatctcctgcctggaggataaaggcctggctaccagccttctgtgtgtaatgtgagggagaagggctggagtattcaacatcatgctgaatcctttcaatgatcatcttgtttttagtaatctcctaccttaactctctgtcttctgctagtatgggaaagatgacctgaaaatctaaccatttatttttcccccattaatatcattttatgattattcagaagttaaataattgtcatgctgtcctccaaaaagactgaatcaactagcaacaaataagaattttctcacagctctgccagcattttaaaagaatagctttattgagcccaggaggtcaaggctgcagtgagctgtgattacaccactctaccccagcctgggtgacagagcaaaaccctgtctcaaaaaagaaatttaaggaacagctttattgttgtaaaatagacatacaataaacagagcacatatttaaattgtgcaacttatactttgatataaccctgtgaaaacatcaccacaatcaagatagtgaatatatttatcacctcctgatacagtttagctctgtgtccccacctaagtctcatgttgaattgtaatccccaatgctgggggaggggctttgtgggaggtgattgaattgtgggggtgcacttcccccttgctgttcttgagatagtgaatgagctctcatgagctccccttcactcactctctttcctgctgccatgtgaggatgtgcttgcctcttctttgcccttctgccatgatgtgtttcctgagtcctccctaaccatgcctcctgtacagcttgcagaactgtgagtcagttaaatctcttttcttcataaattacccagtctcaggtggctctttatagcagtgtgaaaaggaactaatatacctcctaagttacctcaagcttgtttttaattccttctcctcccttccttcattgccaagcaaacaaccacctgttttctgtcactatagattagtttacattttgtgggttttttttttttttgagacaaggtctgactctgttgcacaggagcagagcagcgtatccgcgttataggagatgcgaacttaagaaatgatgataaggagactttattaaatataattttgaattattttgccattacagaaattctaattatttaaaattctattcataatttttaatcactgtacttcccaagcttagcttagaatccttctgtgctgaggattaattttaatttgtcttttataggccttatctaaaatccaagaataattgccagaatcaaccaccttctaaatctgtaagtagaaattagtctttttaaaaatatgcattcataagtatgattagtaataaaaataataaagatgttagcaacctaaagaacatgtatttgaaaggtatttcttacagatataaaaacagtttggtttaataagagacaatcattttttgaaaagtatgacattttttgaaaagtagtttagttttattaaccaagaaaagcctcaagtgaactttagtcctcttgatagctaacatttattgaatgcttactgtgtgcctgatacttttctgacttgcattacctcactgagtcctcacaatcttatgaggctactattagtagccccactttacagatgagcaaactaagtcacagaaaggttaaataggtcgtatagctattaagtgacaaagctgagagcctgtgatcttaaccactttggtatgctgccatgaagttaaatagctcagtagtcattaaaagagaacatttgcattgaaccttccaagccacttaacaagtatatgcttcctaatcaatttaatttagctacattagatagaatggtaaaggatccttaacttaaagtttaaatggaagaaattagccctctgaaagaggcacagattattcatctgcaataaaaatctcacctttagttttttaaaacatagtttttatctgtgttctgaaatgtaactaaaacagtgcttcctgaagtgaaaaattctcactggtgagaattttaataagttttaatgattcaccaaatcacttcagtcatatttcagtcatatgcatatgcatatatagacatataagtttttatctgtgttctgaaatgtaactaaaatagtgcttcctgaagtgaaaaattctcactggtgagaattttaataagttttaatgattcaccaaatcacttcagtcatatttcagtcatatgcatatgcatatgtagacatatatatgttgtatgtatacatgacatcattagacactgtgaaggatagcaaaatgtatataaggcaaaatttatgaacaatggtttaacgtttgggaagcactgggttacacttttactttatgcagattgaaccagtatagtatgcaagtcttaaggaaaaatctactggaaagggccctcattcagacttcccagaggcttctctggaagttgacaatactgacttcagtacatcagctcgtaaatgaggatgatacctaccttatctgctttacacagttgtaaaagtaaaaagtgaactcaggaagggaattacagaatttaggagaaactaaaagcacgatgtaaataatagtcatcattacagttatataatgcttgacaatttatataacactttcgatacatgacaacaataactaacacccagacatgtttatatacattacctcactcagaacaaccatgtgaggaagttggccatatgctttaatgtccaaaccaggacacttttgagagtaaaaagcagtactctttgaccaacaggcataaatcaaaactatcttgtgaaaaccgggatatatggcatccttcctagataatagatacttttactattattaattttgctgtgaatctaaacctgctctaaaaaagttaattttaaaaagtaatgaagtactgatacatgctacaacatgggtaaatcttgaaaacgttatgctaagtgaaagaagccagacagaaaaggccacatattacatgattccatttatatgacacatctaaaataggcacatctatagacatacagagacagaaagtagactagcggttgccaagaactgcagggagcagaagatggggagtgactgccaatangaaaacgcattacgttgaatcgcaatgatatgtgccactttgcactctctgtgacatatataattatttttaatgcattcatttttttctcagagtgcattcgtttgaaaacatagacgggaaatactggtagtcttccttgtcagttagaaacacccaaacaatgaaaaatgaaaaagttgcacaaatagtctctaaaaacaatgaaactattgcctgaggaattgaagtttaaaaagaagcacataagcaacaacaaggataatcctagaaaaccagttctgctgactgggtgatttcacttctctttgcttcctcatctggattggcatattcctaatatcccctccagaactattttccctgtttgtactaaactgtgtatatcatctgtgtttgtacatagacattaatctgcacttgtgatcatggttttagaaatcatcaagcctaggtcagcaccttttagcttcctgagcaatgtgaaatacaactttatgaggatcatcaaatacgaattcatcctgaatgacgccctcaatcaaagtataattcgagccaatgatcagtacctcacggctgctgcattacataatctggatgaagcaggtacattaaaatggcaccagacatttctgtcatcctcccctcctttcatttacttatttatttatttcaatctttctgcttgcaaaaaacatacctcttcagagttctgggttgcacaattcttccagaatagcttgaaacacagcacccccataaaaatcccaagccagggcagaaggttcaactaaatctggaagttccacaagagagaagtttcctatctttgagagtaaagggttgtgcacaaagctagctgatgtactacctctttggttctttcagacattcttaccctcaattttaaaactgaggaaactgtcagacatattaaatgatttactcagatttacccagaagccaatgaagaacaatcactctcctttaaaaagtctgttgatcaaactcacaagtaacaccaaaccaggaagatctttattatctctgataacatatttgtgaggcaaaacctccaataagctacaaatatggcttaaaggatgaagtttagtgtccaaaaacttttatcacacacatccaattttcatggcggacatgttttagtttcaacagtatacatattttcaaaggtccagagaggcaattttgcaataaacaagcaagactttttctgattggatgcacttcagctaacatgctttcaactctacatttacaaattattttgtgttctatttttctacttaatattatttctgcaattttcccaatattgacatcgtgtatgtatttgccatttttaatatcactagacaattcaatcaggttgctacgttggtcccttgggtttactctaaatagcttgattgcaaatatctttgtatatattattgttttttctcctatcttgtaatttctttgagcacatcccaaagaggaatgcctagatcaatgggcacaaataatttgacagctcttattaaacattattctgtaagtaaaaactgaactacttttcagtatcactagcaacatatgagtgtatcagcttcctaaacccctccatgttaggtcattatgaacttatgatctaacaaattacagggtcttatcccactaatgaaattataagagattcaacacttattcagccccgaaggattcattcaacgtagaaaattctaagaacattaaccaagtatttacctgcctagtgagtgtggaagacattgtgaaggacacaaagatgtatagaattccattcctgacttccaggtatttacaccataggtggggacctaactacacacacacacacacacacacacacacacacacacacacacaccatgcacacacaatctacatcaacacttgattttatacaaatacaatgaatttactttctttttggttcttctcttcaccagtgaaatttgacatgggtgcttataagtcatcaaaggatgatgctaaaattaccgtgattctaagaatctcaaaaactcaattgtttgtgactgcgcaagaagaaaaccacccatgctgctgaaagtcagttgtcctttgtctccaactttacttcctttacctctcatatgtttgtgaataagcccaataagcagacncctcctacaaagtgaacctggtctctttcctcctaacaggggtcttgtaacacaggtaagacgagttcaagttttatttcttgnttttagaacggtagtgagcggttttcagcntgagaccacacctaaggtaagtagctgaattggggttttgtcttggctaaagtttaacaaccagctggtcttaatttctccttaccattagagcactcagtaatcatataagttgtgtgatcattcattttgcttaactgtttgtttctgtttttattgctgtttcagtctttttcccattgggtttgacctactctatctgacttgatcaaatccaaaggaaatttccaaattatggggaatgaggcctctgaagtggctaaattcccaccctcccacacacacaaacgtggtatggtgggggaaaaaacggccagcaaaagaaaaaaaaaaaggaaaagatgtttcattttgaccaccaaacgggctttatttacataacaaggccacctttttgctagccaggccatactgaaagagcaatggctgttgccccatgctgtgggttccatagctaacgttctgccttttttcctaccacgacagcctgggtttggttcctaaatcaagccttttctggtttgatacttggtaatgctgaaatagcagcaatttgtcctagctgaaatatcgtaataagattttaaaagatttattttaaaggacctcaatagttaaaagtcagcttaattaaaagctaacatccaagatgtgtgcatgtgtatgtatgcgtctttgtatttaaatagccctcatgttttttttttctttcctaggaacttgcctttttttgagcaaaagtttttttcttctctgttgactggattctgttttcttcatttacttctgctgtctctcctttctcttgcaccgtctgctgcatgagagccctaaaatagtttataatagcctggggttccttaaagaaaatggagaaggtgccaggctcccttttagggagaaacttctatttttccttatggaatccctagagtgtaaacagacaagttcatttcagctcttaaactgcttgcgtttgtgttgtgttacctgatttttttgactattatatttttgactagctattgcaacagaagctactcttgggttttcaaggaagattgtagtttagacatgtagaaatgtcttttaaaaaaaaaacaaacttttttttaagtgcactgtaaaagcatcatatggtctagcctcctaataattttccctttttggagaccaggattcagggtgggctctgcccagagctcagagatccagttaaaagagaggtagtctcggccgggcgtagaggcccagcctgtaatcccagcactttgggaggccgaggcgggcggatcacgaggtcaggagatcgagaccatcctggccaacatggtgaaaccccgtctctactaaaaatacaaaaattagctgggtgtggtggcaggtgcctgtagtcccagccactcgggagactgaggaaagaggagaatcgtttgaacccgggaggcggagcttgcagtgagacgagatggcgccactgcactccagcctggcgacagtgagactccgtctcaaaaaaaaaaagataggtagactcgatgttgtcgtacccgagcaagttagagcaacgccacactttgagacgaatttaagagtcctttatcagccggcgaccaagagacggctaacgctcgaaattctctcggccccttggaaggggcttgattttcctttatgctttggtttaggaaggggaggggagctcagttgcaacaattctacaggagtaaaaacatgcaaagaaattaaaaagacaagtggttacagggaaacaaacagttccaggtgcaggggctctaaatctatcataagatgttaggtatgggggctctgccggacacaaactcaaggctttatgctgttatctcttgagcgaaatcctgggaacttcgtacattgcttgcttcagtaccttatcagttaatcggactctttgatatgttgggagtcagcgtacacaagttaactccttgaggaagggggtgggtaaggagtccttgatgtctggtaaatgaaggagcgaaatcgagttcctctggctttctcagctaagggagagcttattcatgtggaaacaaggctaagtgattaagggagaaagggagagtctgaaaacaaggttaggtattacaatgtcaataaaattggtctccttatacagtcctatggtagatttctttccatctttaatctccctctagcaccaccagactttttctctctgtaccttgagatgtaaattttgctatctgaattttcgtctaagagttgtttcctttaatatgcaaatttagggttatttagctgacaactgccaaagtagtgaaacaagttatcaagaacttgaacgtctaaggtaggaaaaaaaaaagtctttatgaatctataagatgtacttctattggcatgcctaatacgtctatgtatttacgtgttgtgtacacagtttttcactactgaaaatatatagaggagttctaattaattgacttaagacaataaaagcgcttgaatcaaataccttatcaggaaaaaggaaaagacaagtcaaatgcttgttcaagtctatataacttaagtaaaatctttaataaataagctagctttaacattatttgaaatgtcttaagaattgccagcaggttctgggttacagaactagtgggggtgcagtggggtgagggttggtggggtgggnggtnnnacnnnnncnccccccccccccccccccccccccccctccccccccgccccgngcgggccgcgcccccccccgcccccccggcccgccccccgcggccccccacccccccccccccccccccgcgccccgcccccccccccgcgccccccacccccccgcccccccgccccccccccccccccccaccccccacacccggcccacacgcaccccccaccccgacgcccccgcccccccccccccgcagccgacgccccccccccgcccgccccgccccgcacccccgaccccccccgccgccccgcccccgccccccccccccggccccccccccgccggcgcggcgccccaccccccccccccagccccgaccgcgcgccccccccaccccccccccagcccccgccccccgccccgacccggcagtacgctataattccctcttcaccttacctcatctgttctctgatggatgtacttttttttttagtttctaaattcccttttcctttgctctggagatgggtgattgatgtagtctgggtatttgttccctccaaatctcatgttgaaatgtaatccccagtgttggaggtagggcctggtgggaggtgtttggatcatgggggcagatccctcatgaatagcttggtactgtcctctcaatagtgaatgagttctcctgagatatggttgtttaaaagtgtgtggcactcccccattgctctcttgttactgctttcgacatgtgacatccctgctccccttcgctctctgccatgattgaaagtttcctaaggcttcgccaaaagctgagcagatgtgggtgccatgcttgtacagcctgcagaactgtgagccaaaataaacttcatttccatataaattacccagcctcagatatttctttatagcaacataagagtggcttaatacaggctgggcatggtggctcacgcctgtaatcccagcactgtgggaggctgaggggggtggaacatgaggtcaggagattgagaccaccggctaacacggtgaaactccatctctactaaaaatacaaaaaattagtcgggcgtggtggtgggcgcctgtagtcccagctactctggaggctgaggcaggagaatggcatgaacccgggaagcggagcttgcagtgagccgagattgcaccactgcactccagcctgggcgacaagagtgaaactccatttaaaaagaaaaaacaaaatttcaaacagaacaaaatgaaaaaaataccaagtgaaaggcccctataaaaacccctctggggcccatcctcccaccccctcaagtgaaaccacatttaacaatttggtgcatatctttccaaaccttttgttgtacacatataaaaaacatacatgctttgatttggctcagactgtacatagtgttttccctcttgcattttacacttaatatatctttgacatctttctatgtcagtgcatgttggctcgatgatattctatcattaaatacccttccaaaaatggtaaaatcattttaaaaaatcattcacacaagtacatatttacaattttaaaagaaaacagaatcccaaaacacaacgacaaacctctaaaaataatctctatctttccaccagcatggaacagttcattcctttttcacataaaacgaattatgtgattggaaagattaactctaatctacacatttatatacagaatgttctatttgttaagcctatctgaaaataaaaaattcagatgattaattcacttacacttagaaattaagtcaatatactatgaatacacattgtgatcagttataatatgatgcttcttagtctagggtttcaattaaataacagtaaaaaaaattggataaataagacagctaataactgaaaaatccagaaattcaaagattatattgccaactaaaacactgccatttacatttttttttcctacttggtagcaaatgctaatggaattcaatcctgattacttaaagtcagttcacatcacacattcaatcaggataatacgaacataatatgcctactatagcgttagattaagacataaaatttttttgcttgaaagtaatgactgcgtaccacttgagacatttgtcaaccacttcagcacattgtttacgagtgactggatgtccacaaggaataaaaacgacagcaatatttctatccatacagattttgcaaagcttctcctcttgcaggtgtcttagctgctcttcagtactaatctctttctgcaatgaagtctgacttgattcgtcttgtgtactgtctttctgagccttcactggatctgcaatcagaacctcaagtgatttacagttgctcccagatgtctgaattttttcctccattattttcttaatgtctttgaaactgaaccccattcatatagcttcttgtaccataggattatggaagatggtatcaatttttctagttagtgatggcgttttttcagcagttcttaccagacactcctcaagtgaatgggataaatgaatattgtttatatattttcgtgtcttctgttctaacagatatttacaccctggatgccattaacatgttgtcccaagggtcttnctgggctctttctccctttttacccccattttcgtagggatttggttaaaacccatgtaaaaaatccaaacaccggcggggaacgggggttcaagctcgtatccccaccactttgggaacccaaggtggcaggattgtcggaagccaggcatttgagcccacccttgggaaaaaaaagagaacccccattttttttgaacaaaaaccccaaccctcccaggaaagaaataagtatggctgggttgaagtcaccaaagatggccgactggctggtcaagtaactttacctgatggttcgtagaatatttaccttcacccaggtgggagaattgcttgagccaaccctcagtgtggattcaggaacttgatttaattggtatcgtgattgtggattagattctcagggatgcattcactaagtaaaagtgataatagctacttttaagtaaaataatgaatgaatcaaacactctaaatccatggtgctatgctaagctctttctgtattttatctcatttgatattacaaatatttgatgtgttaatagtaatgactatctccatttttacaagtaaggaaactgacattgagagattaaaagactagcacaaatcacaaagtaaatgagatttgaatccggtcttgattccaaactctacagtattctaaattcaaggagactaaattataagatggagagccaattttactttataacagggttagaatggcagaagagacctgacattcacacctctagccagtgcatcatcttcctgtaggcaaatatgcaggaaatctataataagaacgtcctttggtgaaggccaggtgcaggggcttacacttgtaattccagcactttgggaggtcaaggtgggagggtcgcttgatgacaggagtttgagaacagcctgggcaacatagtgagaccctgtctctacaaacaaaaacaaacacaaaacaacttcaagaaaactcctttggtatggatcagaacaagatgaattatctatctgatccaaatgcttaatgacattaagccacagtccactcactgccacaatagagatatacctgccaatgccactcaggtaatcccatcaaaagtggtaatgaggtctgcagcatgacttgttcttagtgatcccagcctgagaccttgagattgcagcattttattctacatatgcacaaaacatctgttgaaaaatcttctaaattgatgcaatacattcgtatcaagaatacctgtctgtaatctccataaaccctctcctttctgttttaaaaaatagtaacagcatttctccttacatgacaaagaaatgacttcaccatctacgaaatagtgaataggagctgtgtggaaggaaattagctctacttcttggtggagatgagaagggagtgttcctctgaaaatcaaggctcttgtcatgctaggagccaaagtcgttttttagagtgtggacagttgagaagataagacagggaccatccactcatgtttttcttattccataggcctctctcaattgggcaaagcactccagaccttttggaagagtgacaccaaaggcaagcacctgcttggcaggcccctcagcttctacgcaagtataagtgagtatataaaatgggggtacttgtgctgttgagtaccttatttccaaatgaggcctgccggtgtccctgtggctgtgagaaggcctctactggataggtggaagttgtgtgttctcatcttttctaaccctggattgacttgcccaaaaggaagccattattaacactataataaaaccatccttaatctgggactctcttcatgcagtggttcttaaccagtgataaacatgagagttacttttggagcttaaaaaaattaagatgctcaaggtctacccaaactgactgaatctccagaggtgaggcccagggatgtatacttttgagccagacctcagtttaccctgcagagctcataaggttgcataacaccctttgtcagccactctgatgaaaagaaaaattggtgaggaataagttttagagaagaaggagcaaaggtgttcttggccagtgagagccaatgacagggaaatgcaaacaatgtatccacaagaaaggtaaattaccctatagagcattttaggataaatgaacatctcatgcctagggttgagagagggtacaaaaaaaaaaaaaaaaaagaccactctggatacacaacgcgataaatggaataaagaattttttccttgtaaattaaaaaaatcctttgttactgaggtataatttaatctattttatgtatagttcaatgaggtgttatagataataaattttttttgtaaattattatattgtcatatactcatacattcatttttaaaagtcagaaatgtatataaccattaaacttataaatcattcagtcattcagagatatagatacacgagcatattttatatccaccacaataattattaccatctcaacaattccatcacccctcaaatttcaagcgtaggggtttttaaatgtcaaaggagtctactcagtgggaagaaagttaaggaaaaaacctttggggctttgggctccttccccctggggttaaaaaggcaggaaattgggcttaccccccctgaaattgggaactgaaattttgggaagtttaaaaaaaaaaaaatcaagcagccttccttccttggcttcccaaattgttgggattacaggcatgagtcaggattcctggcttagtttacattttctagagttttgtataaatggaaacatacagaatgtatttttttgcggagtgggggagtgtttctatttctttctttccattttcccccccccncccccccgagacggagtctcgctctgtctgttgcccaggctggagtgcagtggtgcgatctcggctcaccgcaagctccacctcccgggttcaagcaattctcctgcctcagcctcctgagtagctgggattacaggcgcccgccaccacacctggctaattttttttgtatttttggtagagacggggtttcaccatgttagccaggatggtctcgatctcctgacctcgtgatctgcccgcttcggcctccctaagtgctgggattacaggcgtgagccaccgtgcccggcccaagtgtttctatttcttaaccagctttcatgcaatctttttttattttaccatctctgtgatcccactcccaaaggtactagatgtcgattggtccttaggatcagctaccatttgcccaactgctttccagccttccaaaaatttttttctttttttcttaaagatactcctgtgtgaggctcagaactcttgaattgctactgcaaatatgaactcggtgatgtgaatgccagggaattgcctgattgatcaaagaaatgtatccccttctccctcactcttgctgtcttctcatttgttttccccatccttgtggattcgtgaatttaaatatccctttaatgttataatattttaatggcgtttggcgaaaagtacagaattaggtgcaagagtgcatagctgttattttttttttggcctctgagactgttcatatatgcaagttatttaacagaaagttctgcagtgacctgagatgtcaggggggtctgatagagtacgtttgaaggcagttactggaaaaaaataatgccatttctggtttgtacttcggtaagttcagatgacccaatatattgtttacatgtggcattcagtaaaaaagtagcttcccctccctttcttcttccttttctcctttcctgcttctataaagcatctgctttgggaaacttcttaggaggagagcttgccagcccgtgggtaatggagaggtcttgcagagataaaagagatgctcccactcaatgcaggatggtgtggaggtaaatggggatacgtctggcatcactcaggaatgggccttcctggcagggaaaaaaagggaggggaaagaggaagggaattcnnanatnaattgctgaatacggggattccatggcctggatccaggaagagaactttgggaggtgtgaacctggaaggcatcanctgatgaggagcagcctgaactccggggaggacctgtttttggtggcccggaaaaaaatgccttccacacacagggaggccacccggctgatgggctgggggttggacggacagccctaggacaggcttgggaaaccaggctcaggtagggcctgcgaggttctcgctgcgtctctttccttcctggtcttagaaaatagaatccaaggcctcttgagagtggaaggtgggttgggaggagggcagatggggcttaggcccaggacacccgtagagctactgcccagctgtctctcagggactctgctgaggtcactccaaggatcattcttagccttgctagacagtactgacagagggaaccgtagtatcgcacccacttccttctctttcaatgaaagtttaaaggtcaccatttcctctggcaaaggaagttccacaaatattccatttccggtcttagaaacagcaaggtatcaagcaattgcaaacttcctgtgctggggaattcccaaggaagtaggggcagagttctggtggagacaaagtgaattccgagtgattagtcagtagcagtagcagtagcagtagcagtagcagtagcagtagcagtagcagtagcagtagcagtagcagcagcagaaccagaatttccccgcacgtgtctcaggctctcatttgccaactcagtctctaagtatttttattggcaggaaaaataaaatagctatgagtgaaataattcattagacctgagcctccatcaattttgtgtttaaaggcctgactctctttacctttccctgggatggaagatgcaaatgttcctgatctcactgtcaaaaaagaagaaccagtgggtatattgtatgcttgagttccagccattagtcacaagacatagagatgactgccatgtgtgtagactttctatagactgtgtgctaaacccgacctgccacttccaaggagtagatgaggaatgtccatggttctggggagccctaccccaatttggggcagacattccaaagctcattttctgtggagggggttgatggttaaaggaacggctgggatttactcttctttctagggccaagaaaatgacatgctgcctccatgtttaatcatccttccccctgttaataactatggctttaagtccccggttagggccttcctccaaaattggggaaaaaaattcccctccccccctaaaaattttttttttaaaaaaacctttttttttgggggttgggaaaaaaaccaaaaattttttttccccaggggttttttaatttaaatttctccccaaaaatttgtttttttttttccgcgaaaaaaagacccccccaaaaaaaaaaagttttttggcggaaaaaaaaatattttttttgtgttaagaaatggagaagaaggggggttttttttttcttctccccccacccgccaaaggaaaggttgttcacagattgttttgtgtctcccgcccatatgtgcctgcgaaatcatccttccagaaatatttgcccctttcttttgttatagagtggcactgccctatatggtgaccacttgccacatgtggctgttgaacacttgaaattggcttgtcagaattgcagtgtaaagtgtaaaacacataccaaatttcaaagacatggcacataataaaaaatgtaaaatatctcattaacaatttttatattgactgtgtaagtaacattttgaatatattggattaaatacatggatgatgccccaacacccacagtcccttatcaagtctctacttcacatttttgtacttctgacttagaaatagcactggcgtctaagagcctattaatgtcgtcaataggttcttgggaaccacaattttaaacaaaatgacatataagaaaacgaataacattgaacaaaatgacattattcgaggacctgctgcatgttgtttcacttaaagtcagtgtccaagaaactatcagtgacatttagtgaggaattgctgtccttcctgtttacaggaacctgggcaagttacttaattcctctaagcccggtttatatccctgcaaagagagaaggataataatcaccagtacttagtgatgtcgtaaggagaaaataaaataataaatatgaaatggctgacagtgtccttgtcacacagaagatgtgtgatccacagtagctgctattgtctgcctcacttcactagtaatggtccagggaggcctttaatgtgcatggtgcagtacattcacatgttggacatgggtgaagggaaagaccaggctcatctaaacacaataggatgcttgtggtgttttgaggaggaatcaaggactagttatccacagctgtaacatgcatggatcaaaagagataaggcacacaaaagactttgtcagtagcaaagcattacaaaatgcagagaccagctgtgggtggtggtgagtcagacccagcttccctctgtgcctggctgagtggttctgggcaagtcacgccatctgtcttgatgcccttccccatctatagagagggagcaactgaggccccttccaatactgaagtcctttatttctgctactttagaaatatccacatttttggtaaattcaaatgatccaatgattccatttcctaatgttcaaaactagccccagaaacatctaaatgaatcaaacaaataaaatatttattgtgtatgttttgattgctgaaacttctattttagcaacacacacacacacacacagaacccataagccttcatctttccttggataaacgagccttcctgtctggccatttaagtcacgattaagtaaatgatttccaactcgccttttgcagcagttcagatgggtctttcctgcgtggcagtggccctcctgacttatgatttcctgtgtgtcggcctgttaccactgcagcttaactgaggaaacaagaacaaaacagcctctgaccccaagagactgttggaggcaaaggcttcagtcccaagaacctcacacgtggggagcccgagagcccagccctgaccttttctccagtaataacataagaaacaacaggcactggccttattttggatacaaagagtggtgcttttccttaaatcttcctttagtcaggggtaccccttcatggacgccccaacatccatggttcctgcttgagtccctgcttccatattcctgcacttctcacttgaaatatccctggagtacgttaagcagccaggtttggaagttcttgctgtgcaggcgggtgtgtgcatgtcctctctctcaacaggacacaagctccccaaatcagacggtatgcctccacgccccttcccaagcctccccagcagcaccgagcatgtgaggggagctggggcccaggccatgatgggaagcactctctgcctaaagactagggtgatgcgccctcaactgtgggaatgagccccagctctggtgtctgcctcggtttttcctcctggacaatcaacatgaactcctcacccctcttatccactttgcataaactgaaaataacaaacccagggtctttctgtcacaggaaagggtttttttttataagattaaacagagatgattcaacacacccaggatataacacatgggccatgagtcaaggccaggcattgctctggtcagcctgttgtttgggcccccttggcagggctctcccctgaatcttccccctcttgactccccatcaccacagcacgtccagctttgggtacaaggccagtaaatggggaagggggtcagatgacataaagagccctttcctgtcccattgaaatatatttggataacagatggcatttccccctgtgtcttgcccagggcccagagcctccacttgctagaggcagacagaggatggagagccccttcattagtgggaggacatcacaggtgggcaagaaaccacaagcttgcactgaggcccagccttgaaatagcagcacctgccggcacctgtggtctggggacagggtcacaggatggaggggcctcctaagccttttatctctatgtactaagtacaacccattttcccacctcacagagccagatcagcctctgtgaggtcctggtggcaaaaggataattgcctgcccgcctgcccgcggtggggtgcttgtgcttgcattcctgggaaggttgttgggttactctgcaataggtctctctgaccagctcaccctcctactgcaaacctcaaaccaacttcaaagaagatccagcacccgcgtagtctaaagactgagtctgaagctgtcccttcctgctatggacttcagattttagcccacttgaattgctccatatcctccaagccatggccatcccttgactctctgggctcccaagcacttgctgccttcatcacacagtttgagttaaggcagaaagactggtttccatgtacactttgtggaagctttctcatttctttatataatctctgtcctttgtctactgctttaaaatctagaaattgtttacaaacacaaaggtgatcctttaaaagctcaaagctgattgtgtcaccaatatataccactcttaatggcttcccattaaactttgagtaaagactttatggagcctacataaggccatgactacctggctcttattttcctcctcatcctcatctcaccaactcactctccactcctatacccctcactccttccccctcctctctctgagctccagactcccaattacctacttccaccctttttgacccccagggacttatctcagcctggaattttccctctttgctctccactgaactgtccactcccagtctaagacatgtgcttatgtcacacgcccttaccgtgcttatctcagtttgtaattatctactcatttagaaaagtgttgatgaaggtcttcactgtcagctttcaggatagcaggaatcatagctgattttacttacttaacggggtttcattctttgtaactttttttttttttgagatggagactcactcttgcccaggctggagtgcaatggcatgatctcggctcactgcaacctccacctcctgggttcaagtgattctcctgcttcagcctcccgagtagctgggattacagatgcctgtcaccacgcccagctaattttttgtattttttgtaaagacggggtttcatcatgttggccaggctggtctcgatctcctgacctcaggcgatccacccacctcagcctcccaaagtgctgtgattacaggcatgagccacggcacccagccactccttttttacttatgggtgagaagccattagagatcatttcttcttttctttctctcttcactaaggcaccagggtcactaagtagtaggatactttgaactagaactcaagaaattgagttttaattttacctcacactctcatatgaattctccatgtgacctcgggccatacttcccctgtaccctgtttcctcttttataaaagtaagagtttaaactagatggtctccgacatgcatccttctctaacatattctggaaccttcaataaactaagataaagcagaataattaaaacttaatttaaaagaacacaggaaaggaagcagttacattaagcaaaagagacatcttcatggttgaagaagtgtatgccctggtgtctggatcccatttaggaaacttggtaaccttgcaatcttgggcagattgcttaatttctctagaccatgacttcctcttctgtaagatgtgataagaacatctacctcacaggtttcatgagaggattaaatgagataatgtattataatcccttgaacatggtaggctgttatgttaagtcctttcctccttctctgtagctatcatggaatttaaaaacacattataactagagcatgagttgcgactaaaggctcaattgtctctgcatgtgttggctcatgcatgctttattcctctgaagagcttttataccaagtgaaaggaaataattgcatttccctgaaaattcacaggaaaaagttatgtttttctcttcattcaagtgattctgttagacccaaccacatgcaacaattttaaagttgcttccaaatatatttacaaatatttcctgtcttcaaggaacaatggcaagaccatgactcaggttcacatccggattccaccactaaccatgtacccaattacttcagtcaccttcattcaggtcttacatatcacagaataaaatcagatttcatcagaggaggtgaagacagggagaggagatatttcaatcccttctccgcaacccccgttttttttttttttttaacaaggatcctagagttactgaatgatagcacgtttgagggggaaagaccctaaggatgatctttataagccatcacttggtgttggtggtgataaaaaactcgagtatctttatgcagtggaaagagaagattggactcggaatcagaagcttgagttcaagcactggtttcatcagtcttgtgatcttgggttggtcacttaacctcttcaagggtcctcagctgtgaaagaagatagtatcagctaattcttgtatgtgcagtgaggaggcagtgagatagtgcaggtaaactataaaacaattgtcacatgaaacgcatcacagtgattctttggacccacaagctccaatcttataaaacatatccagtcacccaccaacatagatcatctcaccttgcatatctgattttgtggatcatggggaaaaactgctgattcctagcaaaacccatggcataggataagtgcacaataatttttttttcctaaatgatttagatgacagtgactcattaagggtttcctgaggcctcctcagagtcgagaggtgggtgcctgaagccacccaaagtccctgtcacaggatggctcccaacgcacacaccacaggcctgcccagtatgttccactatctacccagtagagccctgcccagtacgttccactgtcccttccctagaagaggtgactgttgttcacagtcccagaaaagcgggctccccaaaacaatgcaaggacccacctctctctgaacctcacccaccctagttttcctttaaaaatcaatttacaagaagatcatgtgaaggaaaaggttgggtgatattctaacccaagttagctgtttctcaaccaagttctctttgaaaaattcaacaaccacctttggggaattatttacaacagaggagtgaggatgggaccaggataggtattgcctatgttggtggaaccagggtttttttcctggattaccaaagagatggtatgcattgctcccagaagctaaatatcttcaggctttcaatggtggccttcacctgaaaatgttatccctgttgaagctttcaagccagtattttcataagaactatattttctttggtgaactgaggcattataatgatgactatacaggttcttgagtgactgaagccatcattagcattgtcattatttttgtttagttgcatctccatagcagctcacattcacaatgtgctttgcaattgttccttagcaatagccctcacaagattctcaggaggagagggttaatccggattaacatttctgtgaagcctagcgagattaatcgcaagagttttaaaattaagtaaggacgccgggaaacaaatcaatcccagcaaacattttgttgggatttatcattcaagcaattttacagttatccctgtcaaatacattaagtgttcaaaattgggcatagggggaacaaaataataaacccagccaaaacagaataatccctgtttgttcaatgttggataaaaaagacattactattggtgtaaggaaattagatacatcttccattatttagtaaaattaccataacttctaactttgtggctttaggcagtctagtccacaggcaggaaggaggtttgttttggcaaatgactgttatcatcttctgtttcaaagctaaaccataaactaagttcctcccaaagttaattcagcatatgcccaggaatgaacaaggacagcctggacgttagaagcaaaatggagtcaggtaggtcagatcttcttcactgtctcagtgatggcagtttcataactttaaatgatggctatcacagttttcataaataatctagataaacagttaaaataaaataattaggtaaatgtagtgcgataaatattagtagacaaactcaccataatttagaatctaaagttaaattaaataataatatttcattatttggtattttccaagaaaaacatattgtaggaaaccattctttttaaaaaaaaaagtgtccttttaaaaaggtgaataatttttgtctaattcaaagtttattgaaaagttatgtataaaacaaggtaaaaggaacaaggaaataagggaaatgtaaagaaaattatagaaataaagtggtattttttggtaagaaagcttaaagagaaataattttaggtaagaaagaatcttacctaaaattttgtgctagaataaagtgactggctaagaaagggatgttcaaagctatttatgacaaacccacagccaatatcatactgaatgggcaaaagctggaaacattccctttgagaactggcacaagacaaggatgtcctctctcaccactcctattcaacatagtatcggaagttctggccagggcaatcaagcaagagaaagaaataaagggtattcaaataggaagagaggaagtcaaattttctccgtttgcagatgcatgattgcatatttagaaaaccccatcatttcagccccaaaactccttaagctgataagcaacttcagcaaagtctcaggatacaaaatcaatgtgcaaaaatcacaggcattcctatacaccaataatagactaacagagagccaaatcatgagtgaactcccattcacaattgctacaaagagaataaaatacctgggaatacaacttacaatggacatgaaagaccttttcagggtgaactgcaaaccactgctcaaggaaataagagaggaaacaagcaaatggaaaaacattccatgcttatggataggaagaatcaatatcgtgaaaatggccatactgcccaagtaatttatagattcaatgctatccccatcaagctaccattgactttcttcacagaattagaaaaaactaatagccaagacaatcctaagcaaaaagaacaaagctggaggcattgtgctacctgacttcaaactatactacaaggctgcagtaaccaaaacagcatggtactggtaccaaaacagatatatagaccaaaagaacagaacagaggcctcagatataacaccacacatctacaaccatctgatctttgacaaacctaacaaaaataagcaatggggaaaataattccctatttaataaatgatgttgggaaaactggttagccatatgctgaaaactgaaactggaccccttccttacaacttatacaaaaatcaactcaagatggattaaagatttaaacatggctgggcatggtggctcacgcctgtaatcccagcactttgggaggccgagatgggtggatcatgaggtcaggagatggagaccatcctgactaacacagtgaaaccctgtctctactaaaaaatacaaaaaattagctgggcatggtggtgggcgcctgtagtcccagctacttgggaggctgaggcaggagaatggtgtgaaaccaggaggtggagcttgcagggagtggagatcacgccactgcactccagcctgggcaacagagtaagactccatctcaaaaaaaaaaaaaaaaaaaaaaagaaggatttaaacataagacctaaaaccataaaaaccatagaagaaaacctaggcaataccattcaggacataggcatgagcaaagacttcatgattagaacaccaaaagcaattgcaacaaaagccaattgacaaatgggatctaattaaactgaagagcttctgcacagcaaaagaaactattgtcagagtgaacaggcaacctacagaataggagaaaattttttcaatctatccatctgacaaagggctaatatccagaatctacaaggaatttaaacaaatttgcaagaaaaaaaaacccatcaaaaagtgggcaaaagatatgaacagacacatctcagaagaagacatttatgtggccaacaaacatgaaaaaaagctcatcatcactggtcattagagaaatgcaaattgaaaccacaatgagataccatctcatgccagttagaatggcgattattaaaaagtcaggaaacaacagatgctggagaggatgtggagaaataggaatgcttttacactgttggtgggagtgtcagttagttcaaccattgtggaagacagtgtggcaattcctcaaggatctggaaccagaaataccatttgacccagcaatcccattactgggtatatacctaaaggattagaaatcattctattgtaaagacacatgcacatgtatgtttattgcagcactattcacaatagcaaagacttgggaacaaccctaatgcccaccaatgatagactgtgtaaaaaaatgtggacgtataccccatggaatactatgcagccataaaaaagaatgagttcattcttttgcacggaactggatgaagctggaagccatcattctcagcaaactaacacaggaacagaaaaccaaacactgcatgttctcactcataagtgggagttgaacaatgagaacacatggacacagggaggggaatgtcacacaccagggcctgtcaggaggtggggggcaaggggagggataacattaggaaaaatacctaatatagatgacgggttaatgggtgcagcaaaccaccatggcacatgtacacctacgtaataaacctccatgttcttcacatgtatcccagaacgtaaagtaaaatttaaaaaagaaagaaagaaagaaaaggatgttcacgacaaaccagaaagtccaagcatgtcatgaatagtctgtgtaagtcacaataagaggatttatttaaaaaaacttttatatgataaagttgtctataattaaagggaaattataatggtctttctagagattgggttgatgttaaaaaactacttatatattaaaaaattggttagaacaatgaaattttcttacggggttgattcactcttaataaattataagagacttaagaatttttttttaacccaaagttcagcttttattgcatcttgctgttttaggttttctctcccctttaaaagggtgggaaatagtaatgccctccttcaactcccttcagctcatatacgttttttaccctcagattctgtttgttgtgtcctgatgctaacaatgttttcttaaaggtctaaaggaaatgttttcttccaacataatattctgtgcattgcagaaggtcttttcttttgccttttggtaactggcttaacagattttatgttttattgaaataatttctatgccattattattaagttttggtttgcttagaaaacactgagattaatacaattttttaaaaattatgattattacatccatatatctttatgtatgtgcttttaaagtccttgtgacattgagttctagggcttgactcctgggtcttaaaaggacaagtcctgctaaatcttaaatactgacagcaattaaaggctcatcttcaggactggtagaaaatgccaatcaaaataaactgcattcttgaaacacagagccagaaattaaagctattcaactcaaggcccaggaactatagtggaagaggtgggtgtgtgagattgtaagggccaattttgagagataaaataagttcaatttctctataaattaatcataatcattgatgtccaagccacactgatgcaagatcagcatatgggtcctgtgtcagattaacaaggttttcttgaagcattaacctactccttaataaaggttatagaggttataaaaggcttctggaagttatagctatggtcaagataaaaatttcatagattgttaatacaattttggaaaacaaatttaattggcttcttgctgtttttattagggcttattgtttggaaaattaagtctcgtctctcaaagaatgaaggctttcaccttttttttttttttttttaatccttgagttatcactttggtcaaatgaatgacttattttacaatgacctttcatcaagtgttttaaacctttcaaatttgacaaactttccaaaatcaaactacaaattatgtctttttatgacctaatgaatcctttaaaatactaggttccctaaagtccaaaaaaaaaaaaaaataacataatgtggcttatttggtataaaaattttacaagaaacattgtcaaatataaaatattgtgtggttttgtttgggctgtatttgtataaatatgttattggtatgtgttccaaaattataggaaactcctataattctgatatgacttggtgtacattatcagtaataattataattgttatggtaaattattgtgtgccatggaggtaacaaatttcctcatcaagtgtgtctttgactatggttgccctaaaactttttgccattcacagacaattgtcttgctttggtcctctttagaaggtggttttataatcagctataaaactctaacgggtgctcttgaatgcaggcttaagatagctttggagactgtgacatcagaatagaggaaaaactttcagtattcatggagtgctgaaatattcatgaatatcaagcaaaacaggaattaacttcatagatggaactaaaagaatgctgaagtaatctttttgactttttttcttagaatgttgatccttcgttttgtttttcagagtcnaggaaatttttctgttgagatattgacagctttaacaattaagtatactccagtgaacacaatttggagcaatctagtcattccccagcctgaccaattcaatggcccccatcttagttaaaattcctcaccctgacaaggccccatctacgcctctgacctcatgccctccactctcagtcttgcactcaccctgccacactcaagggcttccccaggttccttcttagattccaccgatagctcagggactttgcacatgctacggtctctgcctggctcctccccagatcttctcatgcctagctgcttctcatcagcacccctcagagactgtccctgccccacctctccaggttccatacctgccaccctcccccaatcacgtaacagtttcttcacagagcgagttaccatcccagtatttccctaacttattttttgtgactggtctgttgcctgtctccaccacaagaacataagctgcatgtgaacaggagccttgtctatcttgtcaccccagtggctgtgacataacctgatacacattagatgctcaatgatgtttgatgaatgaagtgctggtagtccaactgtgtttccttgtctgtgtaagtatgtctgttgtggtttcctaagaacctacagctctcccactgtgactcctgttctatggtcctgatttgctggactagaatcctaacctacatgcttactcttagtgtcctcccccagaggctgaatcccagtccctaaacctccaccaaatggctaagacctagcttccaaccagacaggcctacgctgagacctcagcaccgcccttctgcggtctcatccttaacgcatccttcagggcccagcttaaatgtctcttctccaaggaaggctatcctctttctgcccctcagtgctctccatgcctcctctatgcctccatgcctgctttcaaccctgcagaagtggagaaattgctaatctgctgtgttgacactgtgctggggtgccttgggccagggagcaggctggtggtgtgctgatagcccgtggctgtgcccaggtccatgctcacttcctgagccccagtggagtaggctccctttcccttattgcagcactcagaggaaggacgtgcttcttaggacagatctggccaacctctccctcgtgagagaaggcccagccatcctcttgccctctttctttctcctgcccccgagtaataaaggtgcctggtcagagccttctagaaggagacccaaacatccaccacacattcccagttccaaccgtcatccacatggctggctgtgcaggtaaacgcagagtctgtttcacacacccaaccatctagtattggatgggaggacagtagcgtgacactcttctccagccttgagccctactgtgggccccacccaacccagataccagaggagccctgtactgggatgctattggatgcttgtccagtcatgtacaaagttagccctttgttatatagagttagctacgtacatcttcctctgtagggaacccaagaggggagaagagatatgtagtaggatttaacctgcaaatcctctgctgagcaccctgcactacatacagtgggtagcatgtggtaggtgctcaataactattgaccgatagattgaatacaggtaggatggtgacacaatctaagatcccaggggtggggagaccacacgcttggttagggagacccaaagtggaccgtgtggccagaagagtcccgcactgcactctagtgacagtgcagaaagtcactgtgggaaatctagaagtttctacaggttgctatttcatcatagcactgtgcaggccaacccttcctgctccactggctgttgggaaaagctttctcttttcttcctagccagggagctctcaaagtgttccactctctcacctccacccaggcgtccaggtgtggaggacacttgccggctgcttgtctgctgactcatcccttggtttcacttggaaaacctaccaccagctggcctctttccaagcatcagcctcctcattttcttaatcccttaggtgtgatctcacctccacacagtagattgcctcaaggcccaattccaatatgaataaaaatgattattttgtcatcttccaatcttccttttaaaatattattttataattccctttaggaggatcacctaagtgaagactatttttacctaagaaatgttaaaatgtaaagacatggttgtaatctggggattcctgttaaaatggctagcagacagaagtcagacgacaggctagaaatgtgtgaagagtggttgcctttgaaaggcggagttggtaatgattttcttccatttttccatgctttccaattctctacaaaggccttaatattacttcgataaccaggacctctgataacctgcccccaccgagtaaagacttagctgggaaagtcagcttcatgtgaggtaaaaggaaccaggtaatacacaattcccactgccaactgtcgggtgtgcaggcctgagcttcctgcatgtgggaggaaagagaaagaagagagaaactccaagatccaagagatccagcaagaaggctggagtctgaggacgcagaaagctgaatggcacagttaccactattgtgctgaggttctgtggcctctgggtctcttgacaactgggcaaagacccacagaaaactatctctagaccctacctgtgggaggggaaagtgcttaagatcatttacaggacagccacctggacctcaaatggcttacagttccttcatccagagggtcttcatttagtacataccaggtgctaagctgggtgctggagacatgacggggaacccatttaccatggctttgttactgtgacattcacatctagggaaagccagcaaaggggagggatcgaggagagcttgttaggcagagaaaatacccaagggcaagggagaagccagcctgttctgagcacacacagtggttccatctaactgggcctcagtgccaggttggactggagatggggctgaggagctgtcacagagcattctggacacagatgtcacatagtcccttgaggttagggtccttaggcatggcagcattgctttgagtttttccttttgtaatgttgccattcatgacaatgtggaagatgggtccttgcagagaagggcagggctgtgagaccagttaggagactaagatgtgagccaaggaaaatgaggaacacctgaacactggggcaggtgcagggcccagagagaagcagatggcttcctgaggttttaagtaggtagaatcaaggcagctggtacagatcttttattacatataaactggaataagccatctgttccaagacaaaagagtaggcggaaaacaatacaagacagaaatggaattagaacaaacctgggaggaatgtggaattagagtagagagtccaacactggctgcaatcataaaaatgtaaaacaaacaaaaatttgctaggtgtgcttacttagaaataattagctgtcatattaagttcacttgtgttatggcttaaatgtgtcccccaaaatgtgatgtgttggaaacttgatccccaatgcaacagagttgagagatgggacctttaaaaggtgattaggtcataagggttctgccctcataaatgaattaatactgttatcatgagagtagattcctgataaaaggatgatctctgcctcctccccacagccctcttgtgcatgctttcctgcctttccaccttctgctatgggatgacacagcaagaaggccctcaccaaatgcagctccttgatcttggactttccagcctccaaaactgtaagccaaacaaatttctgtttattataaattacccagtctcaggtattctgttctagaaacacaaaatggactaagatcattaaattatcattttttatcagactgttgaaaaatataacagagagtaagaggaaaattaccttctttctttttcctttccctgcctgaccttattcacctcccatcccagagcatccatttattccattgatctttactgacatctattatctgacctacacaatactagacattaggacaatgtggcctgcctccaagaaactcaaataagccaactgagatcagagaggattaatcacctgccaatgggcacaaagcaacaagctgggagccaagtcccaaaatggggcctgctgcttccagttcccctctctctgcattgatgtcagcattatccttcgtcccagtcctgtctccactaccactttccccctcaaacacacacacacacaacagccttagatgttttctccactgataagtaggtgactcaatttgtaagtatataatccaagaccttctattcccaagtagaatttatgtgcctgcctgtgcttttctacctggatcaagtgatgtctacagagtagggcagtagcttcattcatgaactcattcaacaagcattattcactgagagccttgtatttttcaggcatagtgccaacagcagtgtggacagtggtgcatcaaagcctctagtctcatagaacttagtcttctggaggatatggaaaacagacaacccaaacaaccaacaaaagagcaagatgctgcaaaaaaaaaaaaaatgaatagggtgctaagatagagaaaagtgggagagtgctatttagacaaagtggtaaaaacaaagccccttgtgagatgagagctgccgacaggagggggcgggtcatggttgtgggtttttgggtaggacattcagaggagggggcgggtcgtggttgtgggtttttgggtaggacattcagaggagggggcgggtcgtggttgtgggtttttgggtaggacattcagaggagggggcgggtcgtggttgtgggtttttgggacattcaaaagagtctgaatgcacccaggcctacaacttcaagatggtaaaggacagctccaaggatcagaagaagcatgcttggaactggggcattttgagaaggaggaaaaatatgcagagactagtgcttgcagagcttgcatgtggatttcatttgaggtacaatgaaaacccattaatgggtttcacacagtgcaatggcctgacctcacttatatttcctaaaatagaaaacagatcagaaggaaggcaatagagaagcagaaagtccaatgaggaggtttcacagcagtcatgggggtggggtaaggaaaagaagtggaaagaaacagacagaattgggttatattttggagatagaaccaacagaaggaagaggagaaacaacatttactgagaagggaaaaagtaggagaggaataggtttgggaaataaatcctgctgacattggaaaccccaaggaagcctcaaaagtatatttacttgctttagatttaaaagaataggaaagaagcatctcaacttggaatttgaaatctatttttccataaaagtattgttaaattctactcatactcacaagaaaagtacattctaaagagtatattgaaagagtttactgatatacttaggaattttgtgtgtatgtgtgtgtgtgtatgcgtgtgtgtgtgtttaaccttcaattgttgacttaaatactgagataaatgtcatctaaatgctaaattgatttcccaaaggtatgatttgttcacttggagatcaaaatgtttagggggcttagaatcactgtagtgctcagatttgatgcaaaatgtcttaggcctatgttgaaggcaggacagaaacaatgtttccctcctacctgcctggatacagtaagatactagtgtcactgacaatcttcataactaatttagatctctctccaatcaactaaggaaatcaactcttattaatagactgggccacacatctactaggcatgtaataaatgcttgctgaatgaacaaatgaatgaagagcctatagcatcatgttacagccatagtcctaaagtgctgtttctcatgaaggccaaatgctaagggattgagcttcagtcctttttctaacatcttgttctctaacagaattctcttcttttcttcataggagatgcctgagatacccaaaaccatcacaggtagtgagaccaacctcctcttcttctgggaaactcacggcactaagaactatttcacatcagttgcccatccaaacttgtttattgccacaaagcaagactactgggtgtgcttggcaggggggccaccctctatcactgactttcagatactggaaaaccaggcgtaggtctggagtctcacttgtctcacttgtgcagtgttgacagttcatatgtaccatgtacatgaagaagctaaatcctttactgttagtcatttgctgagcatgtantgagccttgtaattctaaatgaatgtttacactctttgtaagagtggaaccaacactaacatataatgttgttatttaaagaacaccctatattttgcatagtaccaatcattttaattattattcttcataacaattttaggaggaccagagctactgactatggctaccaaaaagactctacccatattacagatgggcaaattaaggcataagaaaactaagaaatatgcacaatagcagttgaaacaagaagccacagacctaggatttcatgatttcatttcaactgtttgccttctacttttaagttgctgatgaactcttaatcaaatagcataagtttctgggacctcagttttatcattttcaaaatggagggaataatacctaagccttcctgccgcaacagttttttatgctaatcagggaggtcattttggtaaaatacttcttgaagccgagcctcaagatgaaggcaaagcacgaaatgttattttttaattattatttatatatgtatttataaatatatttaagataattataatatactatatttatgggaaccccttcatcctctgagtgtgaccaggcatcctccacaatagcagacagtgttttctgggataagtaagtttgatttcattaatacagggcattttggtccaagttgtgcttatcccatagccaggaaactctgcattctagtacttgggagacctgtaatcatataataaatgtacattaattaccttgagccagtaattggtccgatctttgactcttttgccattaaacttacctgggcattcttgtttcattcaattccacctgcaatcaagtcctacaagctaaaattagatgaactcaactttgacaaccatgagaccactgttatcaaaactttcttttctggaatgtaatcaatgtttcttctaggttctaaaaattgtgatcagaccataatgttacattattatcaacaatagtgattgatagagtgttatcagtcataactaaataaagcttgcaacaaaattctctgacacatagttattcattgccttaatcattattttactgcatggtaattagggacaaatggtaaatgtttacataaataattgtatttagtgttactttataaaatcaaaccaagattttatatttttttctcctctttgttagctgccagtatgcataaatggcattaagaatgataatatttccgggttcacttaaagctcacattacacatacacaaaacatgtgttcccatctttatacaaactcacacatacagagctacattaaaaacaactaataggccaggcacggtggctcagacctgtaatcccagcactttgggaggccaaggtgggaagatcacttgaggtcaggagttcaagaccagcctaggcaacatagtgagatctcatctctacaaaaaaaaaatgaaaaattaaaaaatgagctggacatggtagtacacacctgtagtcccagctactcgggaggcttgaggtgggaggatcacttgagcctgggagatggaggctgcagtgagccataatcacaccattgcaccccaacctgggcaacagagtgagacccagtctcaaaagataaatttttaaaaatgttaaaaaatatataaaagagaattttaaaagaacaactaatagatcaaagcatggatgcaagatatatttagttggaaaatcaaggttaaaatcaagggatcttggaattaggtgtggtagatttgggtaaggagtagtctaagatgaccctgtttcttggtactggagactggatgagtggcagcgtcttaaccatatttttggtagaaatatggaggtcttctccattccaggatgaatgatgagtaaaattttaggcatgtaatttgagctactagaaggacactcaattgcagatgtacaatggggagatgataacctatctggaactcagaaaaataactgtatatagatatgaaagacatcagtaggtatgtagtagataaaatcctaaaagtgatgtcaaagggagaagagaagtatatggtgaacactgttgtttgtccatgcaattgccatctcttcttcttccttactgacagaaccctgatttcactgagaagtcaacatgcccttccccaattgatgaatccaattggttgaagattatgttcattctattcttacatgactaagtcacgttgacttaatcctatcaaatgagatgtcgatctggaaacaacttctggaaaagattttctaccttgataaaataaagagccatatagatggtcctttatcttccttcttccttgaatgagatatgttctatgaggaagtgaagcttagaactgtggtcagcaacttgcaacgactgggaagtcagagccacacaatgaagaatgcagagtggaaggagaaaaagagccagcatctctgacaacattgttacaccgagaacctacctccagattttaagaaaacaagaaatgctactgttattaagccatttcactgggtttgctatgacttgcagtcaaatctagcttaactgatacagagcaccacagagaactggtctctcatttgtctcatcctgttctttctagcagccacgactttcctagggtttccttagcccaagtctggctagagcaagactaagtaagacttgattccttaatgtccttttgttttaagaaatattaaagaattatttttatattaatatattttaagaaataaggaaatacaaaacactgagcaagcaacacaaattcaagaaatcttaaaaagtataatagctgctcagtctctgattaacagtgaaatatggaatcattgtagaaatggccttggagcgttattctcccaggccagctatccttatggtctgccccacctccctcattgcctaaacagtaagagagtcccatggtgagactcaacagtcttagcacagaacttgttacagtctatttcttttcttacagtcctatatatcaattccaaatcaatgagagtaaagcccaatccctgcctttaaacccaaaggacagaagcccaaagcccaaagatattccctaaccttctccccctcctgtcgctccctatgtttaaagctggggatctctttttcctgtgtctaattattttcctcattggcttgaaaaatctgataaaacattttaggactgtgtataaaatagaattagccaagtgcaatgtctttattcagaagaaatttcatggacgttgtgcctactctcttggcttcctggcttcatggctttccagatcccacagtaagctctggatagtagaagttatagtaagactgacttctaaataaatgaagtgactttaaccttactgatatggcttaaagaaaaggagtggcctttaagatccatgaacttctcaaacaaaagtgataacgttatctccatgcatatataatactaaatataatgcaactgagagaagtaggctgtggtaagaaaggagacccaagtgccatctgaaggcagcacttaccactctgcttcatcccaccgaggaaacaaagcatgagtattgccagattttcttctgtttcaagaaaagccagaaatccaggtttttgcgtgaaatgtcctgattttaatgttgggaactaatttatattttgaaataacattgtgtgggacaagtgaacttgtatgtggaactgctttctcccagtggcgaccagtttggaccgttgatactcagcaagttcagccaagtgcgccttgtcattgtcagtcatcaaggtgatgtgtgattggtcaaacaattagttttgctcagcatctcgtgtgttttcaaaggacctgagggttcatttgcccatgcagatcttgtagtcctgtttattctattaatttatcttgcaaatctataatgttttattttaagcagcgagagccgtggcagcctttggtctggaccctttctaatgatcatttagtatcaggctatgtgggagttgattgttttgcattgcctgaaagccaacagtatcactcctcctctaggtgtggcagagatgtgagagagggagactgacagtctgtgggtgtgtatgcagtgttgggggaagcgaggcacaggggacaatactgtggtgtataaaactagtctaaggtagcatcaggaagttcatgaagccaaaatgattttcataacagcacaagacattatttgtttttgcctccctctcatttttttttttttttgagacagagtcttgctctgtcatccatgctcgtgtgcagtggtgcaatctcggctcactgcaacctccacctccagggttcaagcaattctcatgcctcagcctcctgagtagctgattacaggtctgcaccaccccgccggctagtttttgtatttttagtagagatggggttttgtaatgttggccaggctgccctgtcattttttttttactagtgtccagtggagttttttaggggctacataacatgatactgtcattaatctaatggctaatgaaagggatatgtatatgtttttgtgtttaaaacaaacttctttggggtcctcaataatttttaagagtataaaggggtcctgagatcaaagagtttgagttctgctggactgggacagtggttgtcaacccagattgtacattagggtcatctgggaagctttaaaatagtactgatgcccaaccttaccgcaaaccaattaagccagaatctctgtggatgagaagtcttcattgtcatcatcaccatgaccatcatcattgtcaccgtcactacaccattatcatcatcatcatatcatcttcattatcattgttagtatctccatcaccatcatcagcatcaccattattatcatcatcatcatccccaccatcatcctcatcggaacttcacctgcatggaggacaatccactatgcattaggtgctatgctatttgctatactccttattctcacaactgcccagagaggctgatattatctcactttataacaggaggaatctggatcggaaaagttaaggtaagctaattcacagagcgagaagagatagagccaggattcgaaaccagttctctgctacatcaatgttcccagtccttgcactattgagaacctctttagttatgctttcacccctccaacaccacagtaaattttttctttttttaaaaaaattatactttaagttatagggtatatgtgcataatgtgcaggtttgttacatatgtatacatgtgccatgttggtgtgctgcactcattaactcgtcatttacattaggtatatcttctaatgctatccctccccgctctccccaccccatgacaggccctggtgtgtgatgttccccaccctgtgtccaagtgttctcattgttcagttcccacctatgagtgagaacatgtggtgtttggttttctgtccttgtgatagtttgctcagaatgatggtttccagcttcatccacgtccctacaaaggatatgaactcatccttttttatggctgcatagtattccatggtgtatgtgtgccacattttcttaatccagtctatcattgctggacatttgggttggttccaagtctttgctattgtgaatagtgccacagtgaacattcatgtgcatgtgtctttatagcagcatgatttataatcctttgggtatatacccagtaatgggatggctgggtcaaatggtatttctagttctagatccttgaggaattgccacactgtctaccacaatggttgaattagtttatagccccaccaacagtgtaaaagcattcctatttctccacatcctctccagcacctgttgtttcgtgactttttagtgattgccattctaactggcaccacagtaaatttttatagattttataagcaaattgtatttactgtgcaagaattggtttattttttaaaccatgtgttgcaaacatacaatggttaattgtgatatttgctcagtacaagatcatcagatcactacacagacttgaggtaattccacctaaaagcaaagagaactgaccccacattaactgagaagtctttacttatttattccctataaacgagccaatatgaagagaaggccttaatgtggttaactatgtaatttttttctgactttttgaaatactgagaagagctcatgactctcccatctcctaattctaccttggtggattttagactgaccacaactcatgggtaaatgagggaagacgaataagaaaccttgcttttttttcctccttgtttttggctggctgcagtggctcacacctgtaatctcatcactttgggaggccaaggtgggaagatcacttgagctcaggatttcaaaactggcctgggcaacatagtgagaccccatctctaaaaaaaaaaaaaaaaaaaaaaaaggcgacaggcggtgcgtgcctgtaatcctacctactcaagaagccgaggtggaaagatcacttgagcatgggaggtcaaagctgcagtgaaccttgattgcaccacttcattccagcctgggtgacaaagcaggacgctgcctcaagaaaacaaaaacaaaaccttaattttttggctattcttttctggtaagaatggtatagagatggggatgaggatggctattgtatgagagagcaaacagggtccaagcagtgctctgggctgtctaaggaccagtagtcagcttaacttctcaaatttccagggaaggagttcggagtggtagaatatcctgggtatgcccaaagcatcaccttgcaaatagcctgtcatgaataatttgtttcatttgttatgactggaaactggctttgtgtatgccagagaatgggggcaggaaagagagattggtgtcttgagctctctgtgcctctggggcagtgatgcttttcctctcatgtggaaggagagcatgactgaaaaggtgcacaaataaggtgtctgtgagagaaattaaccttccagatacagagacacaaccttccccaagaggtcctcattgctctgccttttttccttttttttgcttgttctaccattaataacagaaactgattatgacctcaaaagagaggagaaagcgactctccccaccctagagctagttaaccaccatatcttcctagatatccttgagagcaatgtaacccgtgaactcgttttacctgtgtagcagaccaagccgcagacaaaatccntcagacaccaaattaaagaaggaagggctttattgggcctggagctgcggcaagactcacgtctccaacaaccgagctccccgagtgtgcaattcctgtcccttttaagggctcacaactctaaggcggtccacatgagagagtcgtgatagattgagcaagcagggggtatgtgactgggggctgcatgcacctgtagttagaatggaacagaacatgacagggatcttcacagtgcttttcttatgcaaataaccgattagatcaggggtcgatctttaccaggcccagggtgtgtcaccgggctgtctgcttgtggatttcatttctgccttttagttattacttctttctttggaggcagaaattgggcataagacaatatgaggggtggtctcctctcttacctgcggggagtgagctcaaactccttaaaggagttacctgccttccatcatcagggaagcaggaaatcttgccttccttgttggaagcaagtaaaactcaaaacaaacaaagaaaaaaacagggagttgtacagcaaaataaacttttgattttgaccaaattttgggagatcaggaattctctgaaggagatgctttcagacctcagcaaattgtcctgttggtttgagccataaagttagctcatgctggtaccaaacaccagtaggagatttgtcaaaggtaagaggcatctccactcagaatcccttcgtggttaccaacatgtgaaccttggaaatctgagacaggtctcagttaatttagaaagtttattttgccacggttgaggacacccacccatgacagagcatcaggaggtcctgaccacatgtgctcagggtggtctgagcacagcttggttttacacattttagggagacatgagacatcagtgaatatatgtaagatgtacactggttccctccagaaaggcagaacaacttgaagcagggagggagcttccaggtcacaggtaggtgagagacaaacaattgcattcttctgagtgtctgattagcctttccaaaggaggcaatcagatatgcatttatcacagtgagcagaggggtgactttgaatagaatgggaggcaggtttgccctaagcagttcccagcttgacttttccctttagcttagtgatttggaggccccaagatttattttccttctacatcactgtgggcagctgactaggaaagctttgtaggactggtgggcagtgtgagagcccagtggggggtggtggtcctgtgccaatggtagcaaccacctgtgaggctgagtaaactcatttcccaacctcctctagcagccccagtggagatacagaggaagcagactagcgatacaacccagcctgaagttttgtctggtgagtgtaatggaataaaaatgggaagggtgctgaagagaccagcaagaaaatggttgaagagatggggcacagaaattaagctggatcaaaaaggacggaaaagcagaaagggccgatagagagaggggatatctatgggttcgcgattctgaaaaggacaaatcactggtgctttgagaagagagagggtgagaaagcaggaaggctggaggctgtcatccaagaggcggacatctgtgaacatgattccaagagtcaccagaccatgggggtggccaaagggagtgcctcttctcacctcctactcttaattccttgtactcaagataataagttcccagaagagaagtacccatatttaattcatctgtgtcttcctagcagtactaaaaatattatatgaaaggtatcaaacctttgagaatgtgtgctgctaaattgttaaggatgctggaaaactcaagacgtccctgatcctgagcctgagtatgagcctgtggtgagcccaatgcaggtctccattcagacaaaggcctcagggaacggatgagacctagggacagagatgcatgctggagcagcattccccatccctactgcagctcaggccagctgactgctttatgagtaaacgttaccagggaacactttgcagtcttaacacacatgcccacctgtgaccactgatccctgttgggtgaccactgacatcagagattcgatggcagcaatgaagacaaggctatcctcattaggaaggaaaggaaggaggagggaggagggcaaacgaatctttcctgcttgtcaaccacgtccatctctgttaggtgatttcccatgtgtgactttgtttatctttataataactctgagaggtaggtcttgatgtccacattttgaacatgaggacatccagccaggaagttgagttctggggacatagctgagagggcaaagctacatataaacccctctttgttttttctggcttatccactgagtgccccctgcaatccaccagcccatttgtgaagtgcatactataggtaagttggcacaggaggagtggatgtgggcgattttgtcacagctctccaggaacttacacactggtgaggagggccaggtatgttcctgaccagtcacaatcaaagcaacctcctactaatcagggaggcttggtacctggggaatgctatgttgaaaggttcttttctgggttttaaaatgatgggtctatttccttattcttaagattgctttttttctggctagaacttaaaagaaattttcagtaaaatttcccttccctggcacaaagtgagcttgaaatgaattcccaggtggccttgatactttaaaatattgcctcctataaaatcaacctttagaagaaggaagtcaaagaacatgctagatttcacaaaggttaattccttgaaatccagttatctacaggacaatgttgtcaaagaaaaaattatttggccaggcacggcggctcatgcctataatcccagcactttgggaggctgaggcaggtgatcacctgaggtcaggagttcgagaccagcctggccaacatggtgaaaccccatctctactaaaaatacaaaaaaaattagccaggtgtggtggtgggcacctgtaatcccagctacacgggaggctgaggcaggagaatcgcttgaacccgggaggaggaagttgcagtgagccaagttcaagccactgcaccccagcctgggcaacagagcaagactttgtctccaaaaaaaaaaaaaattcaatgatatttttaaattcatggtaaggaagatttcattcagaaccagcacagaagatataggaaacactgcaatgggactttgcggtgggggagagagattgaacacaactacatatacagcacgggcaaggacatattcatagccaggaagcagagcaaagatcagtggatgcgaaattactaagaggaaacatgaaaaataagggagcttctgcctaaacccacctaaccggatccttgctgaagacaggacagggtgattggacaccactttggggatggtggaggatggggaatccagtgagatttcaagggtgatgcgatattgaacatacaaagttcttgctaaaaaaggattttacaagaaagtgtacaaatgtgcctgggacaaggtgcaggagcccgacggagatgtggtccagcagagaatatgtgccgagatgataggtgagttctctgacgaaggatatatgctgatccagccagggtgaaatgctcagagaaagcacggaggggctatgtccgttgccccagtctccacgcggtcaaatctgatcccgttgtgagtgtggccgtttgtagaaagcaatcagggggggtccctccccaatatatattttttatannatntgagacaggttctcactaggttgcccaggctggtcttgaattcctgccttcaagtgactctcccaccttagcctactgcatagctgggattacaggcacaaaccactgcatgcagctaactttgcttctcattccagcactttttattccactgattatatgtatatgtatatctgcatcatctctctctctctctctctctctctctctctatatatatatatatatatggaaatatctctctctctctctatatatatatatggaaatatatatctcagtctctcctatcctcctttaatcagttttgctatcctgtcaattcccccaacgagtgtgatgttgtgaaatatatatttgttcttcatctcctgtttcctgacatacagcttttaaaaacccttggaatctctggaataataagagtgtcttttgcatgctaatagatgactgctggctggcagccccaatgcagtagcttcatgatggggtttgtcacaggaaagaccaaggcaggattggagacttgagactgttagccccactccccaaccactggagggagtggaggggctgaaggttgtgtcagtcaccaatggccaatggttcggtcaatcatgtgtatgtaataaagccactcttaaaaacccaaaaaggacagggtttggaagggctcccagatagctggacacatgaaggttcctggagggtggtgccccagaggggcatggaagctccacaccccttctcacatgctttgctctgcgcatctcttcatctggtgttcatctgtatcctttgtaatatcttttagaataaactggtaaacttaagtgttttcctgagttctgtgagctgctctagcaaattcacggaacccgagggaagcaaacccagatttatagccatcagtcagaagcataggtgacaacctaccacttgtaactggcacctgaagtgggaggcagtcttgtgagactgagccctcaacctgtgggatctaacgctaactccaggtagatagtgttggagtgaattaggacacccaactggtgtcggctgctggaggactagtggtgggagaaatccccaagcatttcggtgactagaggtcacagaagaactcagtgttgaggtgttgtgacagtatggtagggaaaactgcgtctggttttttccttttacaatcagttaaatatttaacacaagtctactgtatattagtaaaagggttacattttttaatgtcttgacagttgcactttgacaacttccatatcaatcactttttttcgtgtccgtttggaaccaaaatcacttgggataccatgaaccaggctgcagcgtattccccaggccttgaaagcttggaggccattttgccagccntaatccctgtgaataccaggcttcgtggatttaaaaaatagacttgaggccaggcctggtggctcacacctgtaagcccagcactttgggaggcagaggcggatagatcacaaggttaggagttcgagaccagcgtggccaacatggtgaaaccccgtctctactaaatatacaaaaaaaaattagccgggcgtgatgttacacgccagtagtgccagatactcaggaggctgaggcaggagaaatacttgaacctgggaggcagaggttgaaatgagtcaagatcgtgccactgcactccagcttgggcgacagagtgagactcagttttcaggggagttaaaacaatacaaaaaaagaaaaagacttgaacaatgaggctccactggatggatttaggggaattacaggaagcaggacctgacggtgcaatgccacactccacctgtccagaattggacctcaccaagggaggtctgtggggacagggagaggccctctgcctccaccccctcctctactccccaaaccctgagtcaggctgaatgtagtaaacctggaacagaaaagttcagtttggcaataggtatctgaaggactccaggtgcttctcccttgattcaaaattttacttataaaaaaaattataagaaaattctacttaaaagaaataatcagggaggtacaacaaattgtacttttttttttttttttttttttttgaaatggagtctcactgttgcccatgctggagtacagtagtgtgatctcggctcactgcaacctccgcctcctaggttcaagtgattttcctacttcagcctcccaagtagctgcgattacaggtgtgtgccaccacacccggctaatttttgtatttttggtagagacggggtttcaccatgttaaccaagatggtctcgaactcctgacctcaggtgacccacctgcctcagactcccaaagtgttgggattacaggggtgagccactaagcccagccattgtacatattttgtgggtatttactaaaacattattcaaaatagtaaaaaaaaattgaaataaactggggactggttaaataattttgggtacaaccacatgatggaatactatacagccattaaaaattacattgaggccaggtgtggtggctcatgcttgtaatcttagcactttgggaggccaaagtgggaggattgcttggacccaggagctcaagaccagcttgggcaatgtggcaaaaccctgtctctaaaaaaaaaatacaaaaaaaattaaaaagctgggtgtggaggcacacacctctagtcccagctactcaaagggctaaggtgggaagatcacttgaaccggggaggtcaaggctgcagtgacccaaaatcgggtcattgcactccagcctgggcaacaaagcaagaccctgtctcaaaaaaaaaaaaaatacattgaagaatatcttacggtatggataaatattcattttacagtgatagatgcaaataaaagcaaattacaaaatatacagtttaattccaactttgatactacatatgtatatatgaatacatgcatatgttatgtatgtatatgtaaatataacaatatatgttctatatatggatattatatatttacacatacatacacacatatataatatcttctctagagagcagaaagagagtagacagataatgaagataggatacaactccagtccagctcaacctaggggacttgttttaaagcctcaggagagagaagttgggactagaaagcaaggcagctatttgtaagcatctttgtgtttcatgctattggggtgggaaacaacagcacaacttttgaaagcccctttctactcaccccacaaactgcagagcagctttaggaccctcagagttcaagaagaccatttgcagagtagaagaagtaaaaacatgtatgaacttgaccctgagctcatggactgtgccatgagggaaattcctaaaacagcaggagaggccctggaggaaggcagaggccctgcatcagcaagtccaggcaaaagcctgcattccatagatgctcatctctctggctggtgaggtctaaagacgtttggtctcaatattaagtctcgtgagagaggtcacaaacccagtcccttggccacaaaaggaaataaattctggcttgagacattagggaggaacagggcaaggggaggttcaagaaagttttaatggatgagatgatatttaagcaaggccctggaaaatgagaatttcaaccaatagccatatggtaggtcagaaagcaaagataaggagggggcaagtgcaaggggcaacatcagatatgaccagggtgtcgtggggcatggctgatggagaagaagattagactggagtttgggaatgccacagtatcgaggttggatttaatcctatgggtaataaagccaactgttcaacccccaacccacttgcaatatggctccaaaatagcaggtgtttgataaaatgactacttttactctactattccctccctcttaagaagaaaaagaaagtggaggctcagagaaaggcagtggcttgtcccaatcacactatgatttggccacaaaacaagaacgaaatgttacacccaaaaatgctgcctccacctcccttccttgctttcctccctgctggactacagactatctcaagagtgacgtacaccatcagggcttcagcttttccccgaaacaatgccaaaatattagccatacgtcactgtagtaagagccctgaattgggaatcccagctttgacgcagacatgctgattgactctgtgaccattctcttcacttctccactctattcttccccacctgtaaagtgaggtcctttccagttataaaaacagatgatgctattgtcctgttttgtatctaatcttgctgtgttataaaaaaaaaataaggctctgtacattcatcttggccaattcccttcttatctctacttcccacagcccctttttctacagaaaaccagcattgttcttctggatccatctcttaagaaagcgctttgcctccccggttatttaggtgataagaagtgtcctagatgacagccctggaatgggctggaggcaacaaaaaagcaagtgaaatagacagttacagcgacgacaataataacaaccaacacctctcactaaagagaaagaaataaaaaagaaaattaaaatctgccgcaatgcccacacagtcattgaataactgcatgtgtacagcacttggttacttttacatacttcatattttagccttcatagcagctcacaggggtggatttaatttttagtccaactcctgtcacggtgcctggcacaagtataataaatgttctgtgaataaatgaccctctttttagatgaggaaatcgaggctcaaggagaacaagcaatgtaatgtccccctcctgttcagccatctgcctttcacgccactgaatgcagtagtcctcagtgccctgaacttgaccctcttctgcttttcggactggtccttctaatcccgttgtgactcactacaccacctctcctgcatatgacatctacattttaaaacaaaccgtatggaaataacacattagtcggcttgttcccccacccccgcaaaaaaaaaggcctctttataacagaaacttctcaggctggtaggggaattttattcccccatttatggtagaaaggccctaaccttggacctcacgccatagctattcacatgggggaatgatgaataacatggggagcagcatgtaaatatcattgagccgtagtccagacctataacacatcgggggagctgcatgtgcctgtcgagatctgggggaggaacaggaagatcaagagttctgtgtaggacatgttaagttgaaggtgcttacaggatagccagatgaagcatcaggtgtgcagtcaaagatatgagtctggagcagcacatcctaagtcacctcctgcaccaacacagaacttccaggccactcacttgagctctcccaaatagtttccaagtgtcattatgttaataacctatgagcttgaacaccagattcaaaccccactgcatggcttttaaagaccatctcaagggcttgacactccagggagccaactaaagatgcctggtcctaccatcaacctccaccccattttttatagaaaatgtttctacctgtcctaaggcagggtcctgccccactcccaggcccctttagatccccaatattcctcctccctgaaccaaaaccctcatcatcttccagcatgggtggggcctccattcttgcttctgctcccctgagcagaagcaagtttctcccaacttgacctgattctcctcctaagtaccagtcactgctttgtttctggaatgagagaaaaagacagagtgagagagacaatccagaactcttgctcactcacagctaggctgggcatctgggaggatggctgtgtccatgggaacctgggaaaagccacacccttggcaccctggtcacccacctgtctccctggcagattccgcactgctctcttgcaccctctaccagggctaaccggcctgctcactctccccagcatgtcttcccacgcccactctctaattattacattcccttcacataaactgcccttctctcccaatcaccacatgttcacttcccacccagctgtcaaagtctggctcaacctcattcttgaaaaggaaaaaacaaacaaacaaacaaacaaacaagcaaaaaacctatgatggattaagaacacacttcattccaggaacatgcttatctcctctaactctcacaacaactacagcaggtaggtgttatcacacccatctctcaggtgagaaaacaggctcaacgagtgcaggaggacacagcaagtcagtgacaaagcttaaattcaagcccaagcctgttggcaaccaacgtctgtacccttgatagctacctcatttaccaccaaatccagtggcctcaggcctggctgcacactgggatcacctggtgcccagaccacatcttagaccagtcatacagaatctcttgggctgggatcctccacggtacattttaagggtccccaggtgagttccaccatggacccagaattgaggacccaataccgtataccatctccttcttcatctcttctaaggcatctcttactcgctgtgcactcccataccactttgttcaatcatccaatcattcattcattgagtcagttagtcaggagctactcactagtcccctgccaggtcctagtcatgacatagggctctggggaccaacaagaagcaggacccatgcctcctgctctcatggagcttgctctgcagcagaggaagcagtcagtgagatgtagcaaatgtgaaatgtgcacagatgggaaaagcaaaactttaaaacttttaggacaaaatacacaagaaatctttgcaactttgggacaggaaggaacaacattccttacacatgacaccaaaggaatcaaccataaataaaaaggtgatcaatttgacctcatttaagtgttaagcttttttcattgagagacaccattaaaaattaaaaatacatgccacaaactgggatacaatatttacaacacttatgtctcacaaaggattagttttcagaatatataaagaactcccggccgggtatggccgcgcacgctggaatctcagcactttgggaggccagcggatcacatgaggtcaggagttcaagaccagcctggccaacatggcaaaactccgtctctactaaaaatacaaaaattagccaggcatggtggcgggcgcctgtaatcccagctactcaggaaactgaggcaggagaatcacttgagcccagaaaacagaagttgcagtgagctgagctcacatcactgtaagcctcggtgacagagtaagactgtcaaaaaaacgaaaacaaaaacaaaaactcctacaaataaataagaaaaaaatagcccagcaggaaaaagtatatacatttcataaaagaataaatacattctgtcagttttctaacatatattttttaagagtaaatacaaatggttaggaaacattttttaaaatgcccaacctcattaaaaattatagaagtgaaaattaagccacaataagatacgattttataccaaatacagtgtcaacactttgcaagtctgacctcaccaagtgttaccagacgtgtgcactgacgtggctgctgagatactgatggtgggtgtgtaaatctgtactacaaacaattgcaataaaatgtaataaatatacaataggtggagcaggaagtgacctgcaaccatatagcagatagggcaggaaaaagcctatgaaagctgacatcaaagggataagttccagttacccagctgaagggaaggagggtgtttcagatagaggaaggataagcatgacctattcaaggccagtgaaagaagcgtgcaacggccaagtcaggagaacctgaaattgtgtcaaagagcttggatgcaaagagccgtgggagactattgggggttttaagcagggatataatattcattcaagcatgcagtaaaaggtcactggcacctgccatgggccaggactcgggctctacatgattgcgtctgttttggaaatatcaccctggctgtgagatgaagaacaggtaggagggtcacaaaacttgaagcagagagactgttgaggaagtaagctgtttttgtgtggactgtggcaatcacagaggcagaggatataaatgcacagagacacaaggcatgtgggaggcagaaggaatcaaatacaatgagtgatcagatgtggggttagagtggtgagtgagaagacatactcaaggtgacacgcccaggtatctgggtggatggtaagacattcatggactaggatcgaggaangaggtggggaatgggaccatacctgcagtttataaggggtggacgagggaagattatgcgggagactgagagaggaatagacaaaggaatcccggtgcagtattacagaaactggggtgggagggggttgtanttcaaaaaggaaagaaaattgtcaaatagtatgaaatgctgcagagaaactcacggattttttttttaagcttagaattattcattgactatgtgaataagaataacttttatgaaagaagttttgcttaagtagtaggaagaagcaaaattgttgagggctgatgagtgggaggagaagtaattgaaggcactctttcaagagaaacaaagcagaaggtgaggagaatactaatgaaggagttacggccttcactattttgttttgctttagataagcaagacttgagtgggtctggtgaggagaaacaagtagagtacaaagttaaaggagagacagacagagatagagatagggacagagagagagacagagacagagcacaaaagagcaaggtccctgagaacacgggccttctgtttaaaccccagccagatgtattgcaattcaattccagtactaaccacccagagtttgtgtagactctacaagttaaagagcatggtccccaacaagactgcttctacgtcagatgccaggcacacttcaggggtccccaagccactcatgttttttgaatgactgccataagttcaaaaattcccacaattctctcagattcaataactgggtataaccactcatagaactcaagaaaatgctatcattattattacaattttattataaaggatacaaatcagaaggactagccaaatgaggagacacatagagagaggactagtaaaaaacagagcttctgcgtcctaccttcaaggaatcaggatgcaccaccctcccagcacatcaagtgctcatcaaccaggaagttcctctgagctccaatgtccagagattttagggaggattcattacataggtatcattgattaaatcattggccatgtacttgaactcaatctccagtgtccctcttctccctagaggtctgaagggttggctaatatcatgtggctcaaagccccaactctaattacctttttggtcttttcagggactagaccccatcctgaagctatctacaggccctgccatgagttagctcattaacataacaaagacacttatattactcagaaaattccaacagttttagaagctccatgtcaggaacctgggacatagatcaaattctttttttttttttttttttggagacagggtcttgctgtgttgcccaggctagagtgcaacgacagatcacagctcaatgcagcttcaacttcccaggcttaagtgacctttccaccttaaccttccaagtatctgggaccacagaaaatggctaattatcctggctgatttttaaactttttttttttgtagggatgggatcgccctgtgttgccaaggttggtctcaaactcctgggttcaagcaatcattctgccctggcctctgtgatggttaatactgagtgtcaacttgattggattgaaggatacaaagtattatttttgggtgtgtctgtgagggtgttgccaaaggagattacatttgagtcagtggactgggaaagtccaccctttcccagtggactgggagacccaccctcaatccaggtaaacacaatctaatcagctgccagtgtggtcagaataaaaggaggcagaagaacagggaaacactagactggcttagtcttccagcctacatctttctctcatgctgaatgcttcctaccctcgaacatcagcctccaagttcttcagtttttggactcttggaccttcaaccacagattgaagactgcagtgttggcttccctgtttttgaggttttgggactcagactggcttccttgctcctcagcttgcagatggccaattgtgggactttaacttgtgatcatgtgagtcaatattccttaataaactcagatatatatatatgtatcagacatatatatatatcctattgtatattatatacagatatataatatcctattatatacagatatataatatcctattatatacaggtatatatatatatatgtatcatatatatatatcctattggttctatccctcttgagaatcctgactaatacagcctcccaaaatgctgagattacaggagtgagccacagccaccatgcccagccccaaattcttaattatacaacaatgggtccagagatcagggcctgggtaggatgcagcaataagaaaacagatggtggatggggacacatgttggaagtgtggcaggacatggctgagggaactcataggatggtgtctattttcatggctgagtgtgaggaacagcataaggtcaaaatttcaggtcaatggtgagttttttaaattgttgctgtgaaccccaaaaatctgacccaggtctcagttaatttagaaagtctatttttccaaggttgagaacacccacccactcacgacaagagcatcaggaggtcctgaccacatgtgcccaaggtggtaagagcacagcttggttttatatattttagggagacgtaagtcatcaatcaatatatgtaagatgtacactggttctgcctagaaaggcaggacaacttgaagcagggagggggcttccatgtcacaggtaggtgagagacaaacagttgcattctttgagtttctgattatcctttccaaaggaggcaatcagatgtgcaattatctcagtgagcagagggatgactttgaatagaaagacaggcaggtttgccctaagaagttcccagcttgactttttcctttagctttgtgatttggaggcgccaagatttattttcctttcacatttccccccctttctttttaagaatcttttaaagaaagcttttaaaaagaaaatgagtctctggtcccaggtttcatctgaattctcgaggggaggatggtttatcctaaacgggtggttctgaattttgagaaagtgcattgtacaaaagccatacgaatgaggaagaattaagggccagaacaaaacaagaagatgagggaaagtttggaacttcttagagactggctaaatggttgtgaccaaaatgctgatagtgatacggacaatgaagtccagggtgacaaagtctcagatggaaatggggaatttgttgggaactgggcaaaggtcacccttgctatgactcagcaaagaaattgggtgcattgtgttcatgtcctggggatctgtggaagtttgaatgtaagagtgatgacttacggtagggtatctagtggaagaaacctctaagcaacaaagtgtgttgcttagaaatttctttctttcttttttttttttttttgagctggagttttgctgtgtcgcccaggctggagcgcagtggcgcaatcttggctcacttcaagctctgtctcctgggttcatgccattctcctgcctcagcctcccaagtagctgggactacaggcgcctgccaccatacctggctaattttttagtattttagtagagacgaggtttcaccatgttagccaagatggtctcaatcttctgacctcgtgatccacccgccttggcctcccaaaatgctggggttacaagcatgagccaccccgcctggcctgcttagaaatttctaagccaggatatggcctgtctgcttctaacagcctgtgctcaggggtaaagaaatgacttaaagttggaacctatgtttaaaatggaagtagagtctaaaaatttggaaaatttgcagcctggccttgtggcagagaaagaatccaagtaggctgcagagcaatcattgctagagagattagcatgactaaaagggagccaagtgctaatattcaagacaatgttaaaaaggccttgagggcatttcagagatctatgaagcagcccctcccatcacaggtgcagaggtttggtgcactaggcccagaggttttatgggccanngccagggccacactgctatgcacagctttgggacactgctgcccgcatccaggccactctgctctggctccacccttggctcaaacgggccaagatagagcttggaccactgctcccgagggcacaagccataagccttggtggtttccatgtggtgttaagcctgcaggtgcccagaatgcaagattgagggagcttgggcacttccacctaaatttcagaggatgtgtcagaaaccctaggttcccaggcagaagcatgatacaggggcagagcccttgcagagaacctctactagggcaatgccaaaggaaaatgtggggttggagtcctcacacatggtccccactggggcactacctggtgatactgtgggaatggggctgctgccctccagaccccagaatggtagatgcactggcagctggcaccctgagcctggaaaagctgcaggcactcaactccaacccatgagatcagccacatgggctactcccagggaagcccacagaggcagggctgtctaaggccttgggagcctaccccttgaaccagcttgcaggacatggaatcaaagattatgttgcagctttaaggcttaatgttttccctgtcaatttcaggcttgtgtgggacctgttgctttttttttttttttttttttttttggtcacaggtgtttgaaccagaacaattccatcttgaataggggctgggtaaaataaggctgagacctactgagctgcattcctaggaggttaggaattctaagtcacaggaggagataggaggtcggcacaagatacaggtagcgaagacctcgctgataaaataagttgcagtaaagaagccagccaaaactcacaaagccaaaatggtgatatggtttggctctatgtccccacccaaatctcatctcaaattataattcccataatccccacatgttgaggggaggacctggttggaggtgattggattatggaggcaatttcccccatgctgttctggtgatactgagtgagttctcataagatctaatggttttataagtgtttggaagttcctcctacacacatgctcacactctctcctgcagctttatgaagaaggtacttgctttcctttctgccatgattgtaagtttcctgaggcttcccagctatgcagaactgtgagtcaattaaacccgttttctttatacattaccagtcttgggcagttctttacagcagtgtgagaactgctggcgatgagagtgacctctggttgtcctcactgctcattatatgctaattataatgtattagcatgccaaaagacactcccaccatgaccccaacagtcatgcctgtgccggtctcagcaccatgacagtttacagatggcatagcaacgtctaaaaggtaccccatatggactaacaaggggaggaaccctcagctctgggaagtgcctacctcgttcccagaaagcttgtgaataatccactgcttgtttaacatataattaagaaataactattaagcatccttagttcagcagcccaagctgctgttctgcctatggagtagccattctttattccgttactttcttaataaaattgcttttactttactgtatgtactcgcctggaattctttcttgtacgaggtccagagccctctcttgggtctggatcgggacccctttctggtaacattttgaccaatttctcccttctggaatgggaatgtttacacaatgactgtatcacttttgaatcttggaagtaaataatttgtttttgactttacagcctcataggtggaaggaacttgacttgaatttcagatgagactttggactttgggacttttgggttggggctggaatgagttaaaagttggggggattattgggaaggcacgattttattttgcaatatgagaagcacatgagatttgggggaccaagggtggaataatatggtttggatgtttgccccctccaaatctcacattgaaatgtaatccccagtgttgaagtgaggcctgctggaaaatgtttggattacaaggctgtcgagcacattggataagacgtgtaggnccccgcagctcgctggttaattctgtggctcctgtgaccactattatagcaccaggtctatgaccaggagaattagactggcattaaatcagaataagagattttgcacctgcaatagaccttatgacacctaaccaaccccattatttacaattaaacaggaacagagggaatactttatccaactcacacaagctgctttcctcccagatccatgcttttttgcgtttattattttttagagatgggggcttcactatgttgcccacactggactaaaactctgggcctcaagtgattgtcctgcctcagcctcctgaatagctgggactacaggggcatgccatcacacctagttcatttcctctatttaaaatatacatggcttaaactccaactgggaacccaaaacattcatttgctaagagtctggtgttctaccacctgaactaggctggccacaggaattataaaagctgagaaattctttaataatagtaaccaggcaacaccattgaaggctcatatgtaaaaatccatgccttcctttctcccaatctccattcccaaacttagccactggcttctggctgaggccttacgcatacctcccggggcttgcacacaccttcttctacagaagacacaccttgggcatatcctacagaagaccaggcttctctctggtccttggtagagggctactttactgtaacagggccagggtggagaattctctcctgaagctccatcccctctataggaaatgtgttgacaatattcagaagagtaggaggatcaagacttctttgtgctcaaataccactgttctcttctctaccctgccctaaccaggagcttgtcaccccaaactctgaggtgatttatgccttaatcaagcaaacttccctcttcagaaaagatggctcattttccctcaaaagttgccaggagctgccaagtattctgccaattcaccctggagcacaatcaacaaattcagccagaacacaactacagctactattagaactattattattaataaattcctctccaaatctagccccttgacttcggatttcacgatttctcccttcctcctagaaacttgataagtttcccgcgcttccctttttctaagactacatgtttgtcatcttataaagcaaaggggtgaataaatgaaccaaatcaataacttctggaatatctgcaaacaacaataatatcagctatgccatctttcactattttagccagtatcgagttgaatgaacatagaaaaatacaaaactgaattcttccctgtaaattccccgttttgacgacgcacttgtagccacgtagccacgcctacttaagacaattacaaaaggcgaagaagactgactcaggcttaagctgccagccagagagggagtcatttcattggcgtttgagtcagcaaaggtattgtcctcacatctctggctattaaagtattttctgttgttgtttttctctttggctgttttctctcacattgccttctctaaagctacagcctctcctttcttttcttgtccctccctggtttggtatgtgacctagaattacagtcagatttcagaaaatgattctctcattttgctgataaggactgattcgttttactgagggacggcagaactagtttcctatgagggcatgggtgaatacaactgaggcttctcatgggagggaatctctactatccaaaattattaggagaaaattgaaaatttccaactctgtctctctcttacctctgtgtaaggcaaataccttattcttgtggtgtttttgtaacctcttcaaactttcattgattgaatgcctgttctggcaatacattaggttgggcacataaggaataccaacataaataaaacattctaaaagaagtttacgatctaataaaggagacaggtacatagcaaactaattcaaaggagctagaagatggagaaaatgctgaatgtggactaagtcattcaacaaagttttcaggaagcacaaagaggaggggctcccctcacagatatctggattagaggctggctgagctgatggtggctggtgttctctgttgcaaaagtcaagatggccaaagttccagacatgtttgaagacctgaagaactgttacaggtaaggaataagatttatctcttgtgatttaatgagggtttcaaggctcaccaaaatccagctaggcataacagtggccagcatgggggcaggccggcagaggttgtaaagatgtgtactagtcctgaagtcagagcaggttcagagaagacccagaaaaactaagcattcagcatgttaaactgagattacattggcagggagaccgccattttagaaaaattatttttgaggtctgctgagccctacatgaatatcagcatcaacttagacacagcctctgttgagatcacatgccctgatataagaatgggttttactggtccattctcaggaaaacttgatctcattcaggaacaggaaatggctccacagcaagctgggcatgtgaactcacatatgcaggcaaatctcactcagatgtagaagaaaggtaaatgaacacaaagataaaattacggaacatattaaactaacatgatgtttccattatctgtagtaaatactaacacaaactaggctgtcaaaattttgcctggatattttactaagtataaattatgaaatctgttttagtgaatacatgaaagtaatgtgtaacatataatctatttggttaaaataaaaaggaagtgcttcaaaacctttcttttctctaaaggagcttaacattcttccctgaacttcaattaaagctcttcaatttgttagccaagtccaatttttacagataaagcacaggtaaagctcaaagcctgtcttgatgactactaattccagattagtaagatatgaattactctacctatgtgtatgtgtagaagtccttaaatttcaaagatgacagtaatggccatgtgtatgtgtgtgacccacaactatcatggtcattaaagtacattggccagagaccacactgaaataacaacaattacattctcatcatcttattttgacagtgaaaatgaagaagacagttcctccattgatcatctgtctctgaatcaggtaagcaaatgactgtaattctcatgggactgctattcttacacagtggtttcttcatccaaagagaacagcaatgacttgaatcttaaatacttttgttttaccctcactagaggtccagagacctgtctttcattataagtgagaccagctgcctctctaaactaatagttgatgtgcattggcttctcccagaacagagcagaactatcccaaatccctgagaactggagtctcctggggcaggcttcatcaggatgttagttatgccatcctgagaaaggccccgcaggccgcttcaccaggtgtctgtctcctaatgtgatgtgttgtggttgtcttctctgacaccagcatcagaggttagagaaagtctccaaacatgaagctgagagagaggaagcaagccagttgaaagtgagaagtctacagccactcatcaatctgtgttattgtgtttggagaccacaaatagacactataagtactgcctagtatgtcttcagtactggctttaaaagctgtccccaaaggagtatttctaaaatattttgagcattgttaagcagatttttaacctcctgagagggaactaattggaaagctaccactcactacaatcattgttaacctatttagttacaacatctcatttttgagcatgcaaataaatgaaaaatcttcctaaaaaaatcatctttttatcctggaaggaggaaggaaggtgagacaaaagggagagagggagggaagcctaatgaaacaccagttacctaagaccagaatggagatcttcctcactacctctgttgaatacagcacctactgaaagaactttcattccctgaccatgaacagcctctcagcttctgttttccttcctcacagaaatccttctatcatgtaagntatggcccactccatgaaggctgcatggatcaatctgtgtctctgagtatctctgaaacctctaaaacatccaagcttaccttcaaggagagcatggtggtagtagcaaccaacgggaaggttctgaagaagagacggttgagtttaagccaatccatcactgatgatgacctggaggccatcgccaatgactcagaggaaggtaaggggtcaagcacaataatatctttcttttacagttttaagcaagtagggacagtagaatttaggggaaaattaaacgtggagtcagaataacaagaagacaaccaagcattagtctggtaactatacagaggaaaattaatttttatccttctccaggagggagaaatgagcagtggcctgaatcgagaatacttgctcacagccattatttcttagccatattgtaaaggtcgtgtgacttttagcctttcaggagaaagcagtaataagaccacttacgagctatgttcctctcatactaactatgcctccttggtcatgttacataatcttttcgtgattcagtttcctctactgtaaaatggagataatcagaatcccccactcattggattgttgtaaagattaagagtctcaggctttacagactgagctagctgggccctcctgactgttataaagattaaatgagtcaacatcccctaacttctggactagaataatgtctggtacaaagtaagcacccaataaatgttagctattactatcattattattattattttattttttttttttgagatggagtctcactctgttgcccaggctggagtgcagtggcgcaatcttggctcactgcaagctctgcctcctgggttcacgccattttcctgcctcagcctcccgagtagctgggacaacaggcatgtgccaccatgcccagctaatttttttgtatttttagtagagatggggtttcactgtgttagccaggatggtctctatttcctgatctcatgatccgcctgccttggcctcccaaagtgctgggattacaggcgtgagccaccgcgcccggcctattattattattattactactactactacctatatgaatactaccagcaatactaatttattaatgactggattatgtctaaacctcacaagaatcctaccttctcattttacataaaaggaaactaagctcattgagataggtaaactgcccaatggcatacatctgtaagtgggagagcctcaaatctaattcagttctacctgagtaaaaaaatcatggtttctcctccatccctttactgtacaagcctccacatgaactataaacccaatattcctgtttttaagataatacctaagcaataacgcatgttcacctagaaggttttaaaatgtaacacaatataagaaaataaaaatcactcatatcgtcagtgagagtttactactgccagcactatggtatgtttccttaaaatctttgctatacacatacctacatgtgaacaaatatgtctaacatcaagaccacactatttacaactttatatccagcttttctgacttagcaatgtattgatgacattatgcatgcttagacctccgtattctattctcggttataacacaatcacagtgatttgtcatatctttccaggatttgttaatttcacttcttcagctgtttcccccttgttggctggaactgattttctatcttctgggagaatcttcagcaagccaactcaggatttgttgggtgcattttgtcaagtctaggacccaggctctgggtgactgatttcctctaattaccgagcaatgtaaaatgaggaagtctgattgtgtaaaggtgttaaacttttgtgtgacggcaaaactttaataccatgaatagagattccagaattttccaacttctaacgggattcctttcactccctgacattagaatgttagaaaatctaccacaaaacatctgtgaggctatcctacaaggcccgtttttcaaaataggtttttacaaggattgctatttgggatgatagtttcagaaaggcgctatcaaagttaattgatgatgtgtgcaagctgaaagttatatgttagaactagcagtgatttcaaaaatatcccttttaggctttttgctaatatatctgctcattttcaaagttcccaatattataaaactttttaaagcagaaagaagaaccctccatttctgctggccccttccctgttcaactaaaaagtattttcccaggcaatgctatcccaggactcacactccatccatccatcacctaccataagttctttgaagggctcattctgagcgcttcctgagtgcctgggatctgttatttctctccatttctgctgctgcatggtagtccaagtcctcctcccttttcccctaggccatttgaatcatctgctaattggttttcctgattgccacggaaacttcctccatcccttcctcacatatcagccacagaagtatctccaaaaagcaaatctggtgacatgaagcccttgcacaaaacccattcattactggttccacacctcctttgtggataagttcaagctcctgagtgtggcaagcagggcccacctggaatcccctgccctcctctcctatcccacgcatcaatctttcctgtctatttgcagttccttgaatgtgatattctttctagtctctgtgcttttgcataacctgttcttcctgactggaaactccttctcctccttgtagtttggctaatttctagtctttcaagactcagctcatgcttcaccccctctataacaagtcctttcccaagctgggtggtggatgctcctctgtgctgtgtgagtcttgaacatcctcagcaaacctcagctttgtttgcttgtctcccttgctgtcaatgcacctgattcagggctggcatatactgttcacctccatgactggctcatggtggtgctccgtgaatatcatccacccaaacggatgagagctaccatgccatcacttgtgacttccatctggagctaacctcccccgacaggaaagcgtttccttaggaaagaatatctttgggttaaatagaagtagagactcaccagaagcactatgtccagctcagaatgaactgctcagtaagcagccttgtcaatgaggaggcagcaggccagccccagaggcctcaaagtgggagagtagagaagcgcagttcctgccacaaaggcacagtggacaccttgctcccctggctggctggaagcagatggtgtccacctgcttccatgggaattctgcacctttaataaagttttatgggacaggaaggtgactggcattgacattgtaacgaggaatgggtggtgccacctttgctgtgtcttaccagaaatacctgtggcaggtaaatttctagagagaccctcccatttctcccatatagcaattttgaaatgtttcctgagggctttccaaattcatctgggaacataggagttccagaaagatgaaatcaaaggtgatggtatgccaaagaaagtagcttttagaatgacttacattagccattcatccattcagcacaccaggcattcagtttgaggggtgtgtgtgtgtgtgtgcgcgcgcgcgtgcgtgcatgagtgcatgcgcgcgcgtgtacataggggaagggaaacaaaacaaaagtacacaagacatgatagttgtcctcaaggagtttttgcaaatgttcacaatttaagagaatatgctgtgctgtggctggtgtataaaccaactgctagggagaggccttccacacacacttggggcaaatgcgacctctaggactgccagtggaatctgggcatgctgtttgtggtcgataaaccctggtcccttgatcagggacctatgtttacttttcctctccctggaagtcttcattagtgggcatccagaaggtcttgcacagggcagagggaggcacaaagacaagagtttgaaaccagcctggacaacaaaatgagtttctatctttacaaaaaaaatttttaaaaaattagccaggtaggattgcatgtgcctgtagtcccagctattcaggaagctgaggcaggaggattccctgagaccaggaattttgaggctgcagtgagctattaagttggcgcaaaagtaatcgtggtttttatcattaaaagtaatggcaaaacttttaatgacaaaaaccgtgattacttttgcaccaatttaatatgattgcacgactgcactgtgctccagcctgggcaacagagtgggaccctgtcacaaaataataaataaataaaatgtaaacatgtaaaaaaaaccccaaaaacaaaaaaaatgggtgttgagacccctgaattgaggaataataggaaggagtgtgattctgtgtgtgcatgcatgggtgtgcaccctcagtgcctgggtggcttaccctgggctagttcaggtggcaaatggttttcctccagctgggctaccaccatcttcccccagggcctgtccatgtatttggtggcaagatacctatggactagagtccctcctcagaggaaaggctcctcccatttctctggctttcaggtagtagtccatgacttcaacaggtccccactgcaatgttatgggttagtttaggtggggtctcctctgagagcctcccatagcccaaaaggccctgtcctagctggcactgcatctccctcttcccagctctcagcctttctctttgctcatcccactccgcacaggctttctgcctgatccttggatgtgtcaatcctgcccctaagggatgcaaggcaatttgtccttttattattaagatctctcctgaggccacgtgtggtggctcacacctgtagtcctagaactttggtaggccaaggtaggagaattgcttgagctcaggagttccaggctgtagtgaaccatgattgcaccattgcattccagcctgtgtgacacagcgagaccctgtcttttttctttttttttttgagacagggtctcgctctgtcatccaggctagagtgcagcggtgtttttctgctcactgcagcctcaacctgcacattttttgtagagacggtgtcttgctatgttgcccagagtggcctcaaactcctgggctcaagagatctttccacctcagccttccaaagtgctgggactacaggcgtgagctaccgcgcccaacaaagaccctgtcttaaaaagaaaacaaaaataaacaactccctcaagtcttttttttttttttgagacggagtctcgctctgtcgcccaggctggagggcagtggcgcaatcttggctcactgcaagctctgcctcccgggttcacgccattctcttgcctcagcctcccgagtagctgggactacaggtgcccgccaccacgcctggctaatattttgtatttttagtagagatggggtttcactgcgttagccaggatggtcttgatctcctcaccttgtgatccgcccgcctcggcctcccaaagtgctgggattacaggcatgagccaccgcgcccagccagacctcttgagtcttaaactcctctgtagttccagccaccctttagcacatgactctgttaattttgttctcactgtctgaaatcatctcctgtccactcttgactgacaggtctctgcactagcccactgcttaatcagagtaggtccctgtcaacttattcatattgtgtccccatgccagtgtggatgattaaaattgttgagtggaggctgatcagatgagccatctccttccaagtcctcacttgctggctcctgtcttagttttagtccccattcttcaaagaacgtgagccctggaaagtattttagtcatttagttcagtgcctttggatgggaggatcacatccctgggtcccgtcctgcagactgttttgctctagctgactaggcaggattccctgccttctctcacttcggcatgggacttccttctgaaattgctgctcagtcaagagaatgaccttccccaacataatcctactccacagggacttaaaggtgtgtcagagatctcttgctcatctttctggccaggtgccaacgtcagtttatagccaagggacaagactagttagcagatcaggcaggtcttagaccccagcgtaagtgccagacttctagctgcagttgttcctgcccacactgggcgttcaggtggagagagggcatggcactacactgagctctcggcgaaacccaggactctgaaatctcggtgtcagccacaggccactcttttcagcaggacttcagtcagtcctgtcactaggctgtcgagcacatggtaggctttaccccaaggagtgtgcttgctgatagcatgtgtgangggacgaggagtaaataatttctgccttcaagaaattgcaaactagtaatggagataaaatcaacagaggaacaattagagtataaggtaaaatctaagggccataagagaggagaagaagtatgggagttcagaggtagggggtaaatgaggggagtaggtgggtagaaaaggttaaaagtaaataatgatgggaaggaagacaaaaagacgacaggggtgccaaaggactcttaacctcatctgaacggagttgccctgttttgctctctgatgctcatgtatctatccttagagacagcttggcgggcaatgtagagcgtaggggctgacatagggggttggagtcccacctccgtgacttctagcaaattagcaaactttgctgctgctaagcctataaggcggacagaaatgccatctttaaagcttgttatgtaaagtgcctaggacctcgtaggcatcaacaggaataatggatgaaacaaaacaacggtgcgtatcttggagaaagtggcatctgagcaggagtattttgaaaggtaggaaagggctccaagcacatctaagagattagggaacgcagaagccttagccctgggtgcagatttaaccaatcaacttctaaccaccgcaggctgagaggtgtggagtgagagccccgccagaggcaggagacccgggcttcggccagaccccgcctcctggtacagaggaccacgcccggctctgcctggagccaaatgtggatcaaaacagcgcgcagcttcccactgctggtgaaaacccgagcaaggggcctcagtttctttatccggaacgtggtgacaatgacatctctttgcaaggctgctgcagggctttctggaaatacgcccgtgaggtatctgggcctgcgcacagcctcccccgcccaggacccagacgtctacctgggggtcccgtctgcgctcccgggatggaaaacgcccaggggaaacttaggcaggcgagcggacgggcacctcccgcgggacgaactcactcggtggcctcctacttccccggccgtgttccaacgcctgagaataacgggaacagcggtcgtactcaccgacagcggcagcagcggtaggcccgggccccaccatgactcttcagtgacagtttttcttcaaacgccgcgcctgtagccaggaccggcgtgccgcgcgtccacgcgtcctcattggctcctgcgggtttgaaactcgctagtcgtcagcacgggagggcgggacaacaggcaataggctctttgcggttggctctggccttgagaacccgaccttggggccctttgattggaagaacgtgcagcgcacctcggcattgagggcggcttcctcggggcgcggcgccgcccgcctctgagtgcgcctgtgagtgcgcctccgagtgggcgtgggaccctccgtgggggcctcagccgggctggtggttggggggcggttacgctgaatccagctggggttggcgcgccgggagtccctgggcggagagacagggcggtcctcccaggatgctggggccgctacctgattctgtcctttcaaagtctcagactcacaggagctgtgaaaaaataatattataaagaggacatatgggtcttatgcatctaaaggctcctagttcttagtactgcagggtggctcgtttaattgtggtaaaatatgcataacatcacatataccattttaaccattttaaagtgttaaatttttcaaaaatgtgcagtttagtggtattaagtaccctcacattgtggcacagccaccactactgtcctttccagaactttttcatcttcccaaatgaaaccctgtacccgtcactaactccgcactcctccctcccccagccccaggcaatcaccattctagtttctgtctctatggatttgacaactgtaggtgccatataagtagaatcatgcagtatttgttctgtgactggcttgtttcacttagcataaagtattcaaggttcatccatgtgtagcatgtgtcagaatttcctttccttttaagggggaatagcatttcgttgtgtggagatgccacattttgcttcttggtccatccctctccggacacttgagttgcttccactttttggctattgtgaataataatatgaacatgaatgcacaaataactctttgagactctccttttcattcttttgggtatataccacgaagtggtattgttggatcaaacggcaattctatttttaattttttgagaaactgccttactcctctcacggtgatctcttgttcaaggtatattttcgatttcacctgatcagctgactataaggccataaggctaacggagaaacgcaggcctagtttctcctagttactaggagatcgcaggcctcgttgtcctgaatccctagacacacttcattccccttgttttaatcctaaattttttttcttttgaagtttgtcctgtttcatctattctccagtttcttaaagaggtctggaaaatgcttttggctccttgtgtatgaaggttcctcttccatggatgctggagaagtcgtgtgtggaggggcagtcatatctgggcacctgttggccaggttcagcttaccagttgggtactcagcagggcatgaagccactgcagcagcccttctctttagccgtaaatagggagtttggaagagagccagggtttctggatttatgcattttgatattttcaatagtgtattaaatgtttaaaataggaaaactgatcattatttttgttaatgactgagaaagggactccttcaccaacagtttcagaaaagtgaaggcggttttgttttggtctttgtagaatctaggtggttgaatgcatgtcagttgtagaagtcaccttgcctgatatcccacgcagtgctggagtattccacagaccccatgtaggtactgcacctttgcaggtatactgctggtgttggtgagctgccttacctgtcctgttattggagacccctgcttattaggaaacttaaaatgaactcaaatgagcttccttgcttactggtcctagtcctttggagcaacataggccagttctgcctcgtttttttccatcctttgggtatttgacggtctattttgtaggacacaaaatgtgggaaaatagctaggcaggtttaaaaattctcaactctaccaagcatggtggcttatgtctgtaatcaatcccagcactttgtgaagctgaggcaagaggattgcttgagcctaggagtttgagaccagactgggcaacatagcaagacctcgtttcttaaaaaaaaaaaaaaaattacaaaaattaaccaggcatggtggcacacacctgtagtcccttctactcaggaggctgaggtgggaggatcacttgagcccaaaagttgaaggatgcagtgcactgtggtcatgccaccgcactccagcatgggaggcagagcaagaccctgtctccaaataaatacataaattaaattcttaactcattcatcaaagtatccactgtagctttccatcatcctggtgttgttttttttagaaggatctggctccattgcccggctagagtgcagtggcatgatctcagctcactgcagcccccacctctctggcttaagcgatcacccacttcagtcacccatctgggtaatttttgtattttttgtagagatggggttttgccatgttgccccaggttggtcttgaactcctggctcaagcgatccatctgcctccatctcctaaagtgttgggattacaggtgtgagccaccacaccaggacaatcctggtggcttttaacggttttccattgctctcaggctaatgacctataagcccctgcgggcttggccttttactccctcagcattagccacctcccttagccttagcccacactactctccccttgctcagtgttatccagacactttgttttttcctttccatactcctctctgtctgggaatccaacctttctttctcatttctctagttgattattattatttttactctagcagccttattgagatatttacataccgtacgattctcccacttacagtgtacaattcaattttctaacattttcatcaccccctaaagaaaccctatactcattagcagtcactccccattctcccctcctctcagcccctagaaaccatgaatctactatccatctctatagatttgccttctggacatttcatatgtatgaaattatgcaatttgtggtctctgatgggcttcttttgttaccaaaatatcatgggtttgatctaggtcctgctgctcgctgcacagaaagccagccactgagatgacaagtattgccaaggaagaaggctttagtcaggtgctgcagctgaggagatgggggctcaatctcaaatccatctcgctgacctaaaaccaggggtttggatagcagggaagaaatgtaacaatgcgtaagaaaacaggaaccagggaggggcaaggaagcaatcctgatgaatgagtggtccaaagtctcattgcctggatgtggtgatctggcgagtttcagttctttgatactttttttgagaggcctgaagtcttttccccaggaaggaactcaaacaaaacaaatacaagcttccagctttaagaccagaagcgtcaatttctatgtttatccgaaagaacagtctatgggactattggttaagtttcactttcacttagtatgctgttttcaaggtttatccacatagcatgtgtcagtacttcattcttttatgactgggtattctattgtgcggatatacaatattttatttgccattcatcagttgatggacatctaggttctttccactttttggctattatgaataatgctgttatgaactttcatgtataagtttttgtgtagacatatgttttcaacactcatgggtatatacctaatgagaggaattactgtgtcatacgataattctatctttaaccatttgaggaactgccagactgttttccaaagcagctgcagcattttacattcctaccagcagtgtatgaaagttccagtttctttacatcctcaacaacacttgttattgtccatcttttaaattacaaccatcctagtggttgtgaaatggtatcacattgtggtttttatttgtatttccttgatgactaatgatgttaagcatctttttatgtgtttactggccatttgtatatctctattcagagtctttgccaatttttaaattgggtcagttgtcttcttcctttttttttgagatggagcctcactctgtttcccagctggaatacagtggtgtgatctcagctcactgcaacttccacctcctgtgttcaagtgattctggtgcctcagcctcccaagtagctgggattacacgcacctgccaccattcccagctaatttttttctttgtattttgagtagagacggggtttcaccatgttggccaggctagtctctttgttgactcttaaccatccttcagtctcagacaaaacatccctttctcaaggattgtgattagcttgattatttgcttatctttctccctgctagtctgtaaactgagggtaggccactatattcattgttcttggcaccaaatagaaactaaattaatgtcttttgaatgaatagggctttctccttttaaagatcccttcaatacagtaaccacactatatataagtagccacaagcccattcaataatactactagtncttgcgccaaaccggctcagcgttactatactggtctcaaactcctgggctcaagcgatctgcccccctcggcttcccaaagtgttgggattataggcgtgagccacggtgcctggcctcaaataactatttaagtgaaacaaaactagtatggcactaatgaaaaatgtataaatccataatcgcagagggatttcaacttacttctttcgattatgtaaaggtcaaacagacaaaagacaatgacaaaacttaatgcaatgaacacttttgatttaatgaacatatattggatatgtacccaagaattagagaatacatactagttttgagtttatgcagaacatttacaaaaatttagtggaagcctaaattataaaaagttgctgtcacgtagaataacacacaaacccctgagtccggaattcaaagccctccacactctcctctacctttgcatctttatcctccaccacactgcagtgcatactctgggctactactcactgttcttgattcaaattccatgttctgtcagctcaaatcattctctctgcctggaataactacttcatacatattctgctattgaattcttgtcttagcaccccatctactccaagacgatgtccagttggggttactccctgtcccattttctttgattacactttttttttctacttccattatattattgatcacatctgtgccacagtttttgactttgtgtctgcttttactcttttctagaccctgatagctcctgaagggttgggtcatttcttttttatttgctcattcctcatggcacagtgagtgcttaataaatggctattgactgaaattaaactgtatctaaatggacatattccacttctgggccattcattctttctttctattggaaccaggagatggggaaccataacaaaggtaaggttgtgccatgtgaaagaacatggaaccttcccctgagggccaaaaaagagcagggaaaggtgcaaagacaaaatcttccatttttaaacaatgtaagaatgtggtccacctcatgctcaggtgggactttatcatgacgttatttttggggacttatagctgcatcatttaccccatatacatttacctttagtgtagggaactgaggacaggaattttgttgatgcagactcttgctaatgaggctaacacttggagaatttttatcatgcattcaagaagcttgttttacatttcttcattaatactttagttggtggtttagctttagttgtaggcttatcagatatttggagatatcttcataaacgatggctttggttttagaagagttattctgaagctactatttctggcaataatcaaacagcatggccatttgttttgtaaggcctttcctagaatatgacggtaaaatctacgtgtggaaaaatgcttattcttctgtcctctataaatgtgaatctagtttgtcttcaaaatgaaatcaagtgattaaaatgtagttttctaagaagataaatggagcaaagcactctgtgtttcacagtgttggaaatcactcatccctcataaaactgtcccaactgatcctgactcacatgaatgaattaaaataagagttaataacatcaatttacatttttaaagacactttcccatgttttagactattggttggaaaagctggtaggtgtacaatttgtggagagttggctgtttttgtctgtcgttgtttgacgtatttcaaagccatatctaattttgttgcagaatggtctgaattctacaaaaatgttgagttgtgtagtgtggagaagtacggagccatttactgaaaggctggggggaaatgacgagaccctgagataaggcagtagtggtgcgaacagagtggaagggaggtagttgagatatgttcagagtagaatcagaatggacatagtgaacaactggatgcaggtgggggctgaggaagcaaagttgaggataattctgagacttctaggttgatccactgaagttacattattcaacaccacaaggaaactaggggaatgagaaggcatactggtttgctttggagtggaagggcagtgatgtaagaggagttaatgagttaaagtttggatatgcctgaacttcaatttgatatgtgcatctgatatacccttggggtgaccctccaggcaatggttgaacatgtgtatttcttagtaactgataggcatcacagactcacatcagtaaggaagcaacagcaaacttgattggacgatatacctggaactcagtaccctatgactggagcaagtctctgtcagtgaaatgaggataagaagaatcttgaccttgtggaatatgttgttaggaatatatgtgatgaacaacataggatacttcctacagggctccacatgtagtaagggctttataaatgcttgataaatattattgttgtaatttatttccaaagtaagatgccactggaggaatctttggaacccaaattaataacaaataggactggatgcaatggctcacacctgtaatcccagcactttggaaggccaaggcaggaggatctcttgagcccagaaattcaagaccagcctgggtgacacagggagaccttgtatctatgaagaattaaaaaaaattaaccagatgtggtggtgcacgcctatagtccctgctgcttgagaggctgaggtgggaggattgcttgagcccatgaggttgaggctgcagtgagccataattgtgccaccacactccagactgggtgacagagtgagaccctatctcaaataaataaataaataaataaataaataagtacaaaccagcaaacactaatcctttctagagattattgaactctggagggcagatctgaatggagccagcagagggacctatggagatcagcctggccctggacagcaccaggcaatggggttgctagagaggtaatggggttgaacagggtttaagccatgaggtctcaagaatccgtgaagactcagactaatttttttttttttgcatgaggattaggtgttcctaggaatttcaatgagagcagggttaatgaaggaatgcagggtaggagagctgagggaaggcatctgagagagcctggcttatgaatggctgcgtcagtatggctcacctgctttccttgtatctacttagcagatgatcccaccccaggcctccagggccaaggtcatttccacatagtcatgggcccttgagggcctggagcagtgtaaggaagacagagtcttaagaaattgcattaacagtcatggtgcttggcaagtgtcgtcatcctatgccaagcctgatctgaaggggtgcatgctcataggtagctgctgcccaagattacagcagcttcttcaatcccagatccatgctctcctatattcatttttccaggggttcctgtccttcgacagtgatgagatgcagaatgacttattgagttattctcctgatagttgccaacttttccaaatgacaatggggcatggagcttgagagtggaaatgaggccctagggatagcgtgcttaggaaaacactcccagcctgatgtaattctgggggtacaatggcattttcatcatcaagactgatgtaaagggtgactagcagtgagttgggggtgactcgcactggggctaggtttctgattctgcctaatccagacagagcagaagcactagtgggctggtagagggcctccagggcctcacttaatgtcctggaaaaacagctccagattgttggttcacgttctgaggacaagcttgggtactacaggatagagagagtggtgggagatgccgtggcctgccctgctgatgcctgccctgccattcctgcgtgtgatgtctctggggcatcttgccttccctgcccagacctgtagttcagctgagggcatgtggaggccaaatggcttcttagagtgttactttccttgaacagctctgctgggagaactggaggagctagctagtcacggtaactgcagcagtcaaaggatcgtcccggtggaggtggggtggaaaggtagagaaagagaacatatagcgttttccttggagatgtgtgggcatgtcatagaggaaatacccaattcctgagccttgagccctccaggaaaccttggaatattaggttagtcatccccaaggaagtctaagaattctggtctcacccatctcctttaattcccacaatgatcctacatgatattaaggaacacgggccagtaaccctccaagcaatggatgtggtggtgaagtttgacctcatgatggagcggaggttggtttgaaacctaagaatttaatttattgtttcaaactgttctccactcagcgttattaaagcatacataattgacacataaaaattgtatatgtctacggtgtacaatgtgatgtttcgatctatgtatacattgtgaaatgattacaacaagctaaataacatacccattcatcgtgtttcaaaggaattaaactcaagcacaaaagagaggtgctgttgaagagtagggctgctctatctaagtagtatgtctggggttgtcctggatcagggtccttttgtgctagtaataaaccagcccttctggggctgctccactttccccacattttcttctggagcctccctaagaattaggacatggccactttctctgcataggcttcctacttcaacaaggacagggcttgtgctgccccatgccacttgagtgtccctacagcacagagctgagtgcacactggctgagtgaggaaatcccccagattaatcttggttctaagcatcatggctgtatttcacacgtatatgaattacaaattacagcatagtcgaataaggatttttgtgctacaactggaatcccagattatgcaaattggatagtataatattgaaattcctaggactttttattagttttaaaaaattatacaagcttagagtaagaaattaaacagtgcaaaagaattcactgtgaaaagtaaaatgctctgtctctgctgagagacagatattgcagcccagatactactggggtcaatagtttcctttaagcatgccattttgatggtttatgggacttacagctcaagaagcttgacactagggttgatctcagaaaatcattgttgcaggtattagatatgaccgtctcataaagatacacacacagacacagcgattggagatattcactggggcttatgggctgcttgtcctttctgctctgtgcctaagttgggctcagagtagcctggcatcggctgtggggagaatgctggcatggggttagcaggagcccacttaacatgtcctaagccacctggaagagtccttcaaggagaccagactccagaggccctaaggaaggaaggacttttgcccgtttttaggtattctagtcccagagtttagggaggaatggtttggctttgggtcgtgtgcccctttaccgagtgggatgggatgtgcccatgagctgttgagctggctcttggagaagacagcaaaagcgggaataagaggtcaggaagctgtgtggttgtaggaaatcccagcagagggcctgggggtcaaaagtggtcatggtagtgacggtggaggctgaggtggtagaaaatcagaggacaaaccccatgggctgctggtgatctgaccgagctcctatgctctcctggttcattttaggctctgtagcagcagatgattggctggtgtgagagcagtgcacctgccatatcaggcaatccaagacaagtccaagctacgctgggaggaaacctgaaggcagcagcaggtagactggctgaagacagacaggcaggcaacttgtcaatcagatttgtgtttttaaggacttttaactggggagccctccgggacagatcagatgagagtgaaatgtgctccgccttagccggccgttcgcaattctgtaaaagggagagtggttttatttatttttaaacatagtcaagctgctaaagtatatgatatgtatagatagagtataattaaatactttcaactacagacaaaatcaggagaatggaattaaaaaacaatttacaaatgggtaatggcagcattgggttgcgcccacccacgagaaggcagacaccaagattctaagatcacacgtggccagcacttcagacttcaaatagaattcgtgattatgcattatttttctcggaaagttttcacttcactatatgctacttgacacttgctttcctaagacatccctctatttttgagatgactaactcagcaattcatttctctcacgcataagctgtcactcaacccaaacccaccaagcctgcattctaccctcaataaggtcttggtgtgtaaactgacccacttcacctagttccttagccctctcttgaccagacatgactctttcataagctagacctataaagtcagggctcttaagtagctgatctctgatagtgccaagtgtcccccactgttcacattttccactccagcttctaacaggtgatagactgctttttgggggtaggggcaccaaaacatatagacctcatgtttggatgtagacactccagtttctttaaattacaactacatattaataatgacttccaagtgtacatttcagtccagatctctccctggatccccaaactttgtaaaacccaccgcctagttgatatcttttgatgtctgacaggcatttcaaatttaatactgtcacaaacaaagttattgattttcatctctgcatctgttacaaatttttcttactttggtaaatagcaccccaggctgtgtcactgccaagaactttccacagctcttggaataaaattcaaaatattttccaaggcagaaaggcacagtgtaatctggctcctgcctacctctccaacctcgtatcacactagtctccctgtcactcaccccctccaggagctcaggtatccttaaagtttcttttctttttttttttttttttttttttgaaacagttttgctctgttgcccaggctggagtgaagtggcatgatctcaggtcactgcaacctccgcctcctgggttcaagtgattcttgtgcctcagcctcccaagtagctgcaattacaggcgcgtgccaccacacccggctaatttttgtatttttagtagagatggggtttcacaatgttggctaaaccggtctcaaactcctgacctcaagtgatctgaccacttcagcctcccaaggtgctgggattacaggcgtgaaccattgtaccctgcctccttgaagtttcttgatccagactcattcctgccttaaggtcttgcatcttcagtcctcccctcaaatgacacctccatgaagacgcaattacctgtaattaccgtgtcttatttagtcaatgtgttggttttctgtctcctccactacagtgtaagctctatgaaggcagaaaccttggcagtccagttcccagcacagtgcctagcacacataggtatttaataacacacagtaaaattcaccttttagtgtgcaattctgagttttgacaaatgcatcaagtcatttaagtctgactattatcaagctataagatggttgcaacactatcactaattccctcatgctccttggtagtcagtctcacccctaacgcccccctcctggcaatcactgatccgttttttgtctttatagttttggtttttccagaatgccaataactaagttttgaatgaatgaatgctattaactctcatttctgactccagagcaacatccatgcaatatttattatttcagccccaaatactgccccctcaccttcactccaaccacctacttgatgatacaaggtgagacatttggcatgtgcttcctccatgttcctagcattttccctatctccttagccttccttctaatcataaacgaagagtgaactttccctttctaaaggcaacttactcctaggacctcgatgccataattttgtttctctagtactttctatatatacaccaaacaattagctccagaaaggtaaagactcactgtgtgctcatcactgtgtctcctagcgcctggcacactgcaggtgctgaagaaacacctacagaatgagtgaatgaatctctccctctctagactccttctcttttgtaatcaaacatgttcaacctgcaacacagtcttatgaccaatcctctgttgtctgacctaggctgagctccagggctgggaccctgacttccttattcaccacctcaaggtctctgcactcacttctctttctgctcaggattgtttttcttcttgtcaccagtcttttctcagacttaggtctcagctcagacattgctgttgaaagtacttctactgatccttttatctaaagcagccattccagccctactctcttgatcatagcaccctgaattaagttgtttacttactgtctcttcaggagggcaaggagcttggtggtggtgttcagggctgtaccaagctgtaccttgcttcaccctgctacactttttagcaaccatctaattttacatgctcccttcactcgtcagaaatttccttattttctacttcaagcaggtatacatatgtgcttctcctgggaggctcacccacttcatgagactacatttggtcctgggtagaaagtgtacaaaatccactggctcagttttaatcaatgtatgttaatattaaccaacctgagatcttgatttccacgcctggctaattttgtatttttagtaaaaacagggtttctccatgttggtcaggctggtctcgaactcccgacctcaggtgatccgctcacctcggcctcccaaagtgctgggactacaggcatgagccagcgtgcccggcctaagatcttgatttctaccatctgaactctgtatttgaactgactgctcctgcttgagcttactggccaaaacttggcccactcagactcacggaagtttctggttcttccctggtaacttttctgaacttaaccactggtttgcttgacaagagattaccatcttctcacttcctagctatgtgaactcacttatctgctctattgctgttcagtctagcacggcacttattgaacgagtgtctacatctgcaccccctacttcttactcatccattctgtttcaatttcttaaaaagaaaaaaaaaaagctattgtaaacatacgattacagaaaatgatttataacatgtgtatgtaccacctagccctgtcaagtcttaatatttgttatatttgcttcaaatcttttttcagactgtagttaaaaattacttaggagccattatttatggcctatttcctgacctagtcttcttgatggtcaatttgcctaatcatcttaagttgcaaaagcttagaattaaagcaaagtaccttcgatcctctgctgttgccttctttttaatatttgggtttgtttgggtcccatttacggttgtgacatcagcttgagttttgggagctgtcttgttcagaaaatggttctggggaacagcctttttcaacttggagtccaaagtctgtgctttttgctgaaagccattattgttatgtttattaccactggttccatttggtcttatgctaggggtgcttggaatggctgaattaaatctgccaactgtcaaattaggcctctggcttacggcttttgacttttgcagtacacatgatgtctgaggtatacaaacttggctggacttctgatcttgcttgatgtttggatgtctgttgttatattcaccctgaagcaaactggggtatgttctgggtttggtgtgcttcactctctgttcagtaacagggtatgaccgtatcttagtttcatttggtctttcatattgactcctattaacctttatatctttgatgttcttgactactggtttctttgatgactgaactttactaagggtccgaataaagtgagagggaaccgtccttgagggttttactcctggtcttgcaagatctgctcctctagagagttgctgtgattttactgggaaagtcctgctttgtgtttctccaacaaattgtttattaaccctatctttcagaacagcactattaactgaacttttgcccaaggcttgtttaggaactaaactgttcttggtttgattataagagtcagtctttggcttacttctggtatataatttaggatctggcttcctctcaggttctgttaagatatctagcaagttctctttgtttgtttcttttagaaagttatccaaagattcgttttcaacatggatattattcataaagtctatacatttaccatttccttgatctgttaactgctgctttgtagttttcaattgctctatattaagtgaccccacaggttttcttgacagtcctcctgtggtggactatctagcttcacactgttgaaaactcttgctgaaaagcttagactatgggttagaagaaacacattttgaagtccgccttttgcccagaagttttggtggctctaacttcagcttctgggaccctgcagtattaggtggtctgggctggagtttaatgctgatggaccttttaggtttgacaggcaaaacaacatggttggtaacatcatttttgggtctaatagtctgaaaaaacaaagaaaatacatattaaaaaatccttaacatatcttattgtttttaaaataataactgtgtttaacacatgctaaaaaaaaaatcatttttagaatttcatctaagaaagttgaatcctcagaaagtaaagaaagactcactaataggtagtttttgtgtttttttttttttttttttttgagacaggatcttgctctgtcacccagtctggtgtgcagtgatgcaatcttggctcattgcaacctctgcctcctgggttgaagcaattctcccaccccaacctcgcaagtggctggactacaggcgcatgtcactacacctggctacttttttgtatttttagtaaagttggggtttcaccatattggccaggttggtcttgaaatcctgacctccagtgatccacgcaccttggcctcccaaagtgctgggataacaggtatgagccaccacacctgtcctaacaggtagtttttacaacttgagttcctatcagaagtatattagaatcttttagcttgacagaattaagcagagatgcagtgaatatacaaaacttgctctttcaaaaatgaatttgcctcaaacagtagttgttgaatgcctattatatcctaagtgccctccaaagaaccctgaaaaaatacatacataatgaacttatgttagggtacctcccaacaaatctctcctagtactttgtatagccacactatatgttttttaaaccactgcctttgtaaacatcacagtatcactcaagaacctctgtctcatccctggagatcagtgacaaggagataggtggcagatgatgtgaggcctgagatatgctgccacagctctcaataaacatgtaacatcttaatagtcatatttgtaaaatcagccaggacagggttttaaggttagagtctatgttaataataaacaaatgtttagtcatgtgatttaagtttggataagaaaggtaggactcgattacagagaattttgaaaactagggaagggagtttagaattcatatggtaagtaattgggcaagccactatgaattcctgagcatctctcatgaaagcaattactcagaaaggagaatttcacagagatttatggaatatgtttccagggtaagatatgggaatgctagagttaccactctatttttgatttgacaaatattgtgaagaatcactacataaacttggcgagtatgtaaaggatttctaaccagaaccatttggcattgagggcaaagaaatgtctactctggatgatagcggtgtgtgtggtgttactaggagtgaaacagcggagttgggagtgggaggcagagagatggatggtatacccacaatggctatatctggattaatctttgagcaccaacatttatatacacctcggatctctccatcattgcttactgaagaggtggagggacgttggcatgaaagcttccaaatgtgtttttttagttgctttcttatatattaaaaacgaattgatataatccacaaaccataaaattcaccattttagtaagtgcacacttctgtggattttagtatagccacactattatacagcaatcaccactgtctaattccagaacatattcatcacccctagaaagagacttgggtttacttgttggcagtccctccccaggtctacatgtgctcgcaagattggatattgaaatatcagcaagaaattaaatgacatagtagtcattatgcctaaattattgttattttttgattgaaaaaagttgaatatttcaaatatcaaggtagtagtgagatataataaagagagagtcagttctaagtatagaattgctgattcagttaagctctgttctccaacatttgggccacattgaagagaccatgtagctgctttcagcctcggtttcctcctttgcaaaatggggattacactacctgcctcacagagatgtaaacttatgacatgttatcatgattgccagggcccacctgttttcttttaaacattgaaatcactgtgcctgaaacagggatttccctgccctttgtgcaagctccagaaacaggagtcagcctgagtcccgcagctaagaacgtggattctggtcattttctcatagcgaacacacttcacaggtccttcaagggagtacattttcctataactcaccttaatctcagttgaagcctcgtttcttattttgcactgtggccaaaaactaaatctcatttctttcacgtaaacttcagcaattcaataatagtacagtcattttatgtttcaactgaaccaagtcagggttccactcctgcctcccctttctgctctgaggacatccatgaagtggagggggtctatgtagcctggagctattggtgaggggcgatgggtccgtggtggtcttggggaactgcggggctgtgtctggctggtctggtgtctggtgattggccttgttccacgcggttcacgctgcaggacagttcgtgtccttcttgtcctaatgatcagcttttaggctcacgggcctgtctctgctgagatatggaataggacagcctctggatcttctttaaactctcctggggccacaggggactctgtttgtgtctgtgcccacataggatgattctgcccagacctttgctgccatttcttgctgttctgctgtttttagtctctggagggcttgcagtttccttggggtccctgtggaagcaaagcaaagtcctctccacgctcagatgtctaaacgtatctgggttttatcgtccacccatcccagagctcagtctagaggagggggcagccttcgggttctctccttcctcccagagcctcttcctttgcaccagggcagcctcttcctatctgttggaaagggctgtctggttcttgaatatagagttgcaggtttgaggggtgtaggctgaggtaaggcaaactatcacatggaataaaaattaccctgtgtcaaggaacaaccagagctggacagtttttaaatgtgaaaaccaattttattcaggactatggcgagaggtgaagtaagacctcagtatagaactgggctcaattccgaatgcagcatgggcaaatgggaatgtatagcctaggagcagggtgggaacctgtggatgaagaattactaaaagggcatatcaggggtgagggggcgtcctggctacacccactaactactgttgctgaagaaaggcctggtgacatcactggggaatggtgggggatgaagaatccaatcagatggatattgaggataaggggatcttgataaactggcttaggagggtttttgctaaaactggttttcataggtaagtccacagacaggtcttggagaaagttcagggacctacggtttgttcgggcagatgctttgtcatctgtcacactggcactgtcacctggctttcctttagtccctcccccccttttttttttctggagtagttttgggagaccagaggagcagggagttagggagagtagtcagaaaaggccagagaaaataaggaggtgtctgtagggaaaatccttaaatcctctaattaaattaatttaatttatttatctgggacaaggtctcactctgttgcccaggctgaagtgcagtggtgtgatctcggctcactgcagcctcgacctcagggctcaagcagttttgccacctcagcctcctgagtagctggggctcacaggtgtgcactaccatgcccgggtaatttttgggttttttttttttttttttttttttttttttttgtagagatgaggtttcgccatgttgcccaggcttggtctcgaactcctaagtgatccatccacgtcgacctcccaaagtgctgagattacaggcatgagccactgtgcccggcctaaattctccaatttttaaatgcttccctgttccctgttccagatttgggatattgactgctgttaaatcagcgatttctccctgtggagaggtagccaataggaagcaacaagagtgaggagtccttatatcgaaatagagggtaagagaagagacagatgttatcttggcagtgatttaagaacagcgagtctgtaagcaaagcaaagcaaggctcccaggtgctgagaaacaatggctttctggggaagcgtctgtgttcagaaccttaagttggaaacatctctgaagatgtttgccatgaaggttttcttctgaagttgagtctttcatcactaggtaggcgtgttttggagtctctatcaaacagatcctgtgtttattaggaagctgtggttcataaagccccatgctaattttgcaggtagcagggtggccctggcctgacccggggacagagtggctgtcctccctccaggcaggaaactctctcctgccacctagtggctgcatacccacatttcaagggagcttctgggtggtgagtttaccagactatggtctgaggtagagttaagcaaaacaaaactaaactgcataaagaaacagaaagaaaatcaggtgttataaaaacaatttggcatttgtttgtgtttcagctccgtgtcgatttattgcttccacaaatagtgccgatatgcaccaggcactgttgtaaaactgaaaatatgtttttggatgtgcccagtctgtgagtattaaacgatggttgatttgaaatttgctatgattcatatttctgggggtaagatgcaggatttctttggggggcctacgatgtggcattctagaattctcaaagaatcaaccctggtgggaccaggaagagctgagctgaggcctctctgctcatgtgtacttactggagatcatggagacaggtgagcctgagtgcacgtctcaccaaagccacagcagagggggaggaggcggaaagagagctctctccatttctgagaagttaatggtaacaatggcatacatacctactttacagttgaaattggaaaccacagcattaagtgtttccaatgaaatttggcaatttgggagttttctgagctgcattggatgtggttttgcatgctgttaggatgagcaagagatgatggagaacatcttccttttgagcttcctcttggacgtgggtcactcccactcatggaattagaaagcttagacctagacttgaatctcaccttctcaaggtgctcccgggcaaatcacttaagatccatcttcttctcctcctgctccttctcctccttctgagtttttttttttctttccaaaattcaaatgacacggtactggtagaagaaaaggtccaagtctgcttttacagctcccctcatccccaaatgtactccgaccccaagatgaccatgttatcatttgattgacatccttctagtttcaactcatttctttgcatgtatatgcacgtacatatacactattttattttgccaggggtcaccgtttagctgcattaatttcttataaaataatctatatttacttatggtttacgtaaaacaacatacacatgtaagtgtatagcttgataagtcttcactgtaaaccaaaaataaaattcgaagcccccccaaccgtctgaatggacccctcttcttggccaagagcattccaaagttaacctgaaaaaactagttcaggtcatgatggaagggaaggttggacatgccccagtatacccttctcccttttggaattcaggaaaagctgaccagcattaacatcaacacagaccttatgtctgataggaaactttgacaatctattccctctgaagcttgctacccggaggcttcatctacaagataaaaccttggtctccacaaccgcttatcataacccagacattcctttctgttgagaataatttaccttgtaacctggaagctccctgcttcaagttccctcacctttccagattgaaccaatgtaaaccttacatgcattgattgatgtattatgtctccctaagatgaataaaagcaagctgtatgttgactgccttcagcacaggttgtcaggacctcctgaggctgggtcacggatgcatccttaaccttggcaaaataaactgtctagattgactgagacctatctcagatactgttgggttcaaatatataacttatgaaactaatacacaaatcaagtcatagaatatttccatcactcctcatctacccccaaatttccttatgcgtctttgcagtcaacctcccaccccatccccaggcaactgcagatctactttttgtctctgcaccttcaactgaccctttctgtgatttcatatgaatggaatcatgcgctgagcagtcttttgtgtctggcttcttttgctcagcataatgtttttgaggtttgtccatgtttttgtgtttgtcaatggttaatttctctccattgcagagtagttttctattgtacatgtgtaccacaatttgtatatccattccattgctgatggacatttgatttgtttccagattttggcaattatgaatagagctaccatgaacacccaggtacaagtctttgtgtggacttatgttttcatttctcttggaatggaactgtcatatcaataagtatatgtttaactttgtaagaaactgacaacaaattatctgcgatggttatgccattttgtttttctaccagcaatacacgagcatttcagttgctccacaactttgccaaaacttgttttctttaatttggacatttaagtggtgtacagaggcatctcattgtggttctagttttctttgccctgatgaccaatggtgttgaacatcttttcatgtgctttttgaccatttacatatcctcttttgtgaagtgtctgttcaaatatttttgcccatttaaaacatttgggggtttgtcttattattgtgttgggagagttccatatttatttatttattgagatggagtctcactctgttgcccaggctagagtgcagtggcgtgatcttggctcactgcaacctccacttcctgggttcaagcaattctcctgccttagcctcctgagtagctgggattacaggcatgtgccaccacactggctaagtttttgtatttttagtagagatggggtttcatcatgttggccagactggtcgcaaattcctgacctcaagcaatccacctgcctcggccctacaaagtgctgggattacaagcatgagccactgtgcctggcccatatttattttttattctttattttgtatacaagttcttggtcagatacaataatacctggtcagatgagataatgagttggaaaatgctttgcaaatgggggagaataatttaaatgttatttatttattaagagcagaggcccttcctgttgcggtcacagaagccgtttgcttcttctgccttttataaaccagcagagtcgagctacacaggctgtctgtgttggctgctattagttaatcagagagttttttttttcttgccttgtcattctaatttgtgacacataattagccacaatatgtgttttcagttgtgacactggcctgggaaaccaagggatgtttagagtggatttccttgattttgcaataattgtgtgtttttctgcatcttctgttaaacacaaattcatggaagcaaaacatggaagcaaagtaccctggacatccccccttctttatgaaattgatttctcttaaatgtaatgtttgcttgttcccttactttaaaagcaatttaagagtttattgagaaagtgagccctggaaacatagatgcatagagagaaaattctaccaccctcaggtccctattgtcttctctcataaagtgtagtttcagggccttttagaagtttcttttctgctctgatttgcatgtttgtgagtgttgctattttaagtatttggatttggtctgcaaatcctatgagagatggcaacagagtagggatctcaaagcctgcaggttgtattaagtccagcagggccttgtatttacaacagagggtccttgaagacattccatatattatgctaggggagtggccaagcaaactttaatgtgtccctatggtgggatatttggggttaatacctgcccttctcttaatttctttttcttttctttttttctttttctttctttttttttttgaaatgtagtcttgctttgtcacccangctggattggagtgcagtggtatgatctcagctcactgcaacctccacctcctgggttcaagcaattctcctgcctcagcctcccaagtagctgggactataggcacacaccaccatgcctggctagtttttttttttttttttgaaacngaatctcgctctgtcgcccaggcgggactgcggactgcagtggcgcaatctcggcgctcgcatccctcatatccatgagtgttctgtgggccctgcctctgaaataaatcctgcctttgtctcccagttcactccagccacccatcctggggctgcaccctcctccttccaagccctctccctttccttcctggtgctgcctgtcatgtcaagcatatgcatcagtgcgaccaggacatttgaaatgcaaccagtacaattgggcgcggttatgcctaccagtttttcttccttaaacattttatatttatgtttgaaagcatgccacctttcttcacttgccaacttgacagatttattagttgacaacatccgctgatagcatcagtaataagttaattgtttttgcacatgtagctttaattattctcattatcatttataggagttattctttgtaaagggtaactgagttttccaaaacaaacagaaatttggggtgggcccatggagcgtgactcatgaaatcagattcttagaaggacctcggcaagtctctgggttgctgttaatgagcctggctggctgccaggggtgtgtctgccctttatgaggccaccactgttcaaatgcttgcctgcagcattacttgcctaggtagtgcttgtttctactgaactgtcagggatccaattctttgtggtctaagtaacaatactcagattcacaaggaattgattaataagccagaatgccaatgtattacatttttgatgaagaccatatttacagtgattgtatctgctcaagctcaaattaggattagagttctgacaaatacatatgtgagaagtatgaggttaaatacttgaaatttggacttttctagaaaatctgaatgtgattgccattcacatacctttctggggatgatgattcttgtacttttattttaaaagacatagaaaactaacttaagaatcagattgcttggctgggcacagtggctcatgcctgtaatgccagcactttgggaggccaaggtgagtggattgcttgagctcaggagtttgagatcagcctgggcaacatggtgaaatcccatctctaccaaaaatacaaaaaaaaaaaaaaaaacaaccaaaaagaataaattagctaggtgtgatggtgcgtgcttgtagttccagctacttgggaggatgaggtggaagaattgcttgagcccaggaggtggaggtttcagtgagctggggttgcaacagtgtactccagcctgggcgatagagtgagactccgtctcaaaaaaaaaaaaatcagattgctttattgctggttttctttctaaaactgagattgggtcccatcatcccctggcccccattggttaatggttcctcctttgtctattgaataaaatacagatgtctgcttttggcaacatggttgaatgtagacactgcagggtcttcctgactcaaaatgagtaaggcttagataaaacacattttgaaatgcatttctggatgaacagcaaggaaaggagatctcttaaaatcctctttctgttcccctctccctaccccctccaagtgggcttaagtaggaagggtggtgagcggcaggtaaacacacgtcaaaggcagtcttcctctctgagggaaaacacttgtataagcattgcaatcaatgggcctctttaattatgtgccagtggcaagagcgggtgctgaacccaggggcctgcctcaatccggggcctttgaggcagaataaagtggtctcaggttgttggcatttccttgcccttccacccgaagcagacacaaatcctctctggaggcaagttccccaattcagccagtacaactcccacagactaagatcaatcatgtacaagctcacagacaaaggtcaccaaacacacagagcaataaacaaattcatgagtgacgtgaatgagaataaacagaaacaataaccaccagctgggatgctctaagtcttcagctgttagaattcctgaatatagaataaaactgccacaatggcaaacatgcatctagtacttactgtgtgctgggttctaagaattttgcacattgtgccagataccgactcagcttcacactcaccctcctactgtgccctcttaatttgcactagattaaaaggtagaaaggaagaggcagctattctgttcttggctgtgcctctggcagcacatgcaaaatgggcagtaacagtggcagtcacaggtaagtagccttctcacagtgtggagttaaaggcatgggactgagacgagcaaggttcctaaagggacagtggccagtagatgaccaggggctactggagtggctgcatggctctgtggaagctcagaggagccttgggtcctgcaggtgcagtagcagctttctgtagttcctgatctctgggtcccacaatcttccccgtttttgctcctccacttctaattttgtaactgacttccctgtgtgtacttctctctctgattgaaatagccagactggtttctgtttcctgataagacattgtctggtacgaacacagtaactcatttaatccgatatctctatgaaggaggtacaataattattcctattttacagatgaggaaacacagcagagaaataaagtcaattgtctaaggttgcacatttagtcaagggaagggttgatataacatataattatttagaaaacatctaaggaaataaaaggcataatttaaaaataaaactaggcaggtttaaaaaaatgaagtaatctataagtaaaaaagtataattgttgaaatacatatcttagtggatgggttaaatagctgaagaaatgattaatgaactggaaggtagttctgaggaaatcagaattcagcatagatagaaaaaatgggaatttacaaaagtacacaggaattataaaagaggttaaattatagggagggtagaatgagaattaacattggtctaactggaattttggaagaagagaatagagagaatgaacaaggcaatatttaaagaggtggctgagaatttttcagaaccaacacaaactatgactttaccagtagagaaaacaatgtacactgaggaggataaataaatatactatgaacaaattgtaataataatactcaacaaagacaaagagaagatgttaaaatcagcaaaaaaagaaagtcagacttagaaagaaatgacaatggcagactactcaacaacaacaatggaatccaaattcggtcaaacagtattttcttcatgctagcatatagcgggagtccgctatgctcctaaagatttgcacctctgatctggtttgtagttagtctcttttattgctttatcctactcaactaatttttttagtgcctgttttttttttttttaatgtgtgttgatgactacaattctaaactcattctactgattcatgggtgctttaaaatctgagcagtctttcgcatttactgcctgtgatggcccatcccaccagctaaagtgtgtggccactgcttacagcaccatgtgataacgagtaagggagagatgccgcccagactcttctaggagcagccagtaggaccttccaggggttgcaagcaaaccacagcaatatgtggagtgtggcagaggatggccccaagaggatgtggcagcggctagtgcagctcagcttagtctgagaggaaatgctggagaggagagcccagtctgtacaggcatgacagccacaaggacttcaacagctaacatggctgagtggactttatgtgctatctcattcagaaaacaggagcaatcagaaaggagtcacctcctatttgtaccccaggaattgctaacctacttgcatctgaatgatgtccatcacttcccttcatcacctcctctgggggctctgcaaggatttgactcctgcattagtgatctgtctcacctacgttgtgattcacatgaacttactaatgtgctatgtgacaactaccatcttaaacacaaaaaccctcttttgattctgtggctccctccagctacccctgcatttctctgtccccctgccccgtctctgcactcacttttattttacagcaaaactactcaagggagtctcagtgctccttggctccatgtctccacctttcattctctcctcagttcactcctgtcaggcttccgtcctcaagctcttcttcacttttgttctagggccgctgacatcctctttcttgccaaattcagtggccaggtcctcacttactcaactgctcagcattgttgggcctggtggaccacattctccttcacccaccttttgctgctctctcttctctccagatgtttctctcttctcactggctactcctcttttgtctcctttgttagctccatttcttccttccaacctcactgtgctggtgtgcccagtgctcagtttttagctattctctcttttccagtggcattcattagatggtatcatgtgacccatggcattatatgccttctacatgacagttactcctgaatatgaatctcaggaaagatttggatttatttttaattaatttttttaaattttattttaataaatgaggtctctctctgtcatccaggctggagtgtagtattgagtgatgtgattatagctcactgcagccttgaaccatgggctcaagtgatcctcctgcctcagcttcctgagtagctgggactacaggcatgtgccaccatgcctggatgactttttgtgtgtgtgtgtgtgtgtggagacagggtcttgctctattgcccaggctgatcacaaactcctggcctcaagtgatcctctcacctcagcctcccaaagtgctgggattacaggtgtgagaccatcctgggctaagattcagattttgtattcaattgactgtttgacatcttcacttggacacctaagaggtatctcaaatattaattaacttggccaaaatacagaacttttgacccctgcccccacaatacttgccccttccccagacttctccatttctgttaaatatccccagttactcaaccctcaaacctatgaatgccctttgatttctttctttccctcatctcctacgttgacgccatcagctagttttgttgcctttatgcccagaatataatcctcaccaccttctctcctattgcccgagtataagatgtcagtttttcctgcacagtccattgccctgacctcctgagtggtttgcttccacttttgacatttgtattcctctttcccccagggtcaatttttcacagcaagagtggcattttttttttttttttttttttgagacggagtctcgctctgtcgcccaggccggactgcggactgcagtggcgcaatctcggctcactgcaagctccgcctcccgggttcacgccattctcctgcctcagcctcccgagtagctgggaatacaggcgcccgccaccgcgcccggctaattttttgtatttttagtagagacggggtttcaccttgttagccaggatggtctcgatctcctgacctcatgatccacccgcctcggcctcccaaagtgctgggattacaggcgtgagccaccgcgcccggccaagagtggcatttttaaaaccatatattagatcattgcttttgtgtttgggaacctccaagggctttgcatcatatatcaagttgacacctctcctacccaagcctggctctttcctgctcctctgtcctctcagcccctccacccattgttcatgctgcttcagccacactggccttcttgccatgccacatttgtgctaagcccacatccaatctcggggcctttgcactcgcatttcctctgcttggcatgctgtaccccagatctttcatgattggcagcttctgtacattcagccacctgctcaagccaccctttcagagggccttccctggccacctcacctgaaatagcacctccgattgcacccatccggttattctccatcctgttctcttgcttggtgattttccatcactgatgaggaaatgaaccatggaatgctagggctgatgaccagaactttcccccacccccacattattacagaggaggaaatgaggtcggaggtaagatgggcccaggatttctactcccgcctggactgcaggcacagcactgacctcagctgtgctcactcttggcattcacccaacccttctatctccaactgccccatttaccagaaagtgaaatgttctcagagacggtgagccacctgacttggacagcagcccagggcccctggcaccctgctttcttcctccctgccatcctttcctctccaagacctacctttccctgtgattcttgcccacatgctgcatttcatggttttatgacctgatttctgagagggatttgaattttcatgattatttatgtaagcaaatcattatgcttatacaaatgagaaaaggagtgcttctggacttcccagggacaaaatcttgtcacttggcttgctttcatattgctaattaaggacccaggatgtgggtgagatgtgctaaaagctgagaggaggctctggactctgactatgggcccacacccctgggcaggcatcacactagtcctttaggtcatcctcaacccagcttccagttgaatcagatgtttgtgaataactcagcaaggctgtatgggaaatgaagaatgaggtggggaagaggcctgtgcagaagacacactgacttacccctctacctctaactagggtgttgtagcagccacccacccaccaagtctgtcttccagaccacgtatgctttcctccacctttgcatcttttatcttctgccagcccagatgcttgctgactccagcccaagcctataggataagctacagcctgtccctacagactacgcattgcagaatctaagacatcaagtcaagttcggaagcacttgccttctcctctccaggtacacaggctctcctggaaagctggtagcagctgtggaggtgtggtgtgttacctgctgcaggtgcagagaagttgacttcacagcccttcagaaagactgccttcttccagttgtatttgtgtacttgcttgggtgtggggaggattctcagctttctccactcaaattatcagaccctttccatttagtggtagaccatttccctcgtccaggccaagggcacatagtacagagaaatagggagttgttacccagggagagaacttggctctaaacctgtaatagaaaggtcagttctggtctggagggtcaattttgatctttggctcagatccaggaattggaaccaaggcttttgaacattttaatgcaggggattaaaaaaatgatacgagtcattcacgaatatatttgcttaacatctaaagagatccctcaaaacactagaaaaaataagaacaaaaatctaataaaacaaaatttgttaaacacatttaccaaatttttttttttggtaaaaattcaaatgtcataaataaagctaaagttcctcttgatgactcgctcctctgccctattccactccaagtaaccactattatcagtcttgccaatacccttccagacctctctacctctatataccattagaagcacatggttttgcattgaggatgtgcagtgttttgttttacgtaaatgttatcactctgttcttgttccataatttgcctttttctctcaatgatttgcttggctatctttctatttcagtagcatctcctttctttttaacttaccattgtttatttaaccttgcctctatcaacagatatgtaggttgtttctagttgatttcattaagtatttataaacaacgcatcagtagatgtccataaatttctttacggaagatggcaagtagtggaattgctgagccaaagaacatgtttaaaaaacccaaaaaaactagacgctaccaattttctctccaaaatggccatacccacttacccatacagagatgatttggaatctggcttcctcacaaggtgagatgccttcacagtttcattcttcctggcatgtcttcccttttgtatctgagagagctggcagaattgtgtcactaaatcaaggatagagggtcaaatgacagctcaagctcacaggcacctctgctttcttcccagaccacctgctttcctgccaccagctctgttccatcttatagaatggttgccacttgggtgtctgctccgacagccatgtcatcctttgcactgcagttatgaagcagacagagctaggagaggggctttgccagcctctgccctagcttggagaatttcaaagaaggagggtattgagagtgagctgccgaagactggcagctccctcaactcaacagttgtccttccacaagaagtcagatacatttttttgggataaaatatttaaaaattattattttatttctgaataatatatttacatgattcaaaaatcaaactgtaggccaggcatggctgcttatgcctgtaatcctagcaatttaggaggccgaggcgggaggatcacttcagcccaggagttcaagaccagcctgggtaacatagtgagaccctgtatctacaaaaatttaaaaacaaaaattagttgggcatggtggctgatatggtttggctctgtgacccaactcaaacctcatgttgaattttaatcctcaatgttgagggagggtcctggtgggaggtgattggatcatgggggtgggttctcccttgctgttctcatgatagtgagtgagttctcacaagacctggttatttgaaagtgtgtagcacctcccccttcactctctcactctcctgctccgccatagtaagatgtgtgtgtttcccctttgccttccgccatgattgtaagtttcctgaagcctcccagctatgcttcctgtacagcctgtagaactgtgaatcagttagacctcttttcttcataaattacccagtctcaggtcattctttatagcagtgtgagagtggatgaatatagtgccatatgtttgtattcccagctacccaggaggctgaggtaagaggattgcttgagcctgggagtttaaggctgcagtgagccatgactgtaccactgctctccagcctgggtgacagcgagaccttgtctccaaaaaaaaaaaacccaaactgtgtaaaatgtgttcataaaagtgtcttgctcccacacctgtccctatatatcttattcctcagcctccgacaactactttattcatttcttatgtatcttccagaatcaaaaaaaaaaaatcaaatacaagcacagtggaatgtattgcccttcttcccctcccttttgttacatcagagttagcatatcataaatacggtctgcattttcttctttttcagctatcagcatgttttggagaggatttcatattcgtgcagacagcatgtattagtcagtccttgcattgctataaggaaatacctgagactgcataatttataaagaaaagaggtttaattggctcacagcttcgcaggctgttccacaggaagcatggcagcatctgcttctggggaggccttaggaagcttttactcatgcagaagacaaagcgggagtggatgtcttatatggcaggagcaggactgagagagagagagagagagagaaaggatgccacatacttttaaacaaccagatcttgtgggaactctgtcacgagaacagcaccaaagggatagtgctaaaccattcataagaactccacccccatgatccaatcaccccacaccaggccccacctccaacatcggggattacaatttgacatgagatttgggctgggacacagaaccaaacaataccagagtgctttctcattcttttctatagctgcctagtattctatgtcctttacttcatttaggcagtctcttgttgatagacacttgggttacttccaatttttcctattacaaatgatgtgcaatgaataattttgatcattttccatttcacatgggttatgtccatctgtgggataaatctccaggagtgaaattgctggatcaaaggggaagtgcacttgtgattttcatagttagcaaattttgttctataagggtcatatcaatttatagtcccacgcgtaatatttaacagtggggatttcccgacagtttgaccaacaaggtctgttgttaaacttttgatttttgtcaatctgatgggaaaatactagtatctcaaagtgcttttaatttgactttcttattacaatgttaagcatcattttactctgcccaagatcaaatagtattttcttttctgtgaacagactgttaagatcccttgcctcttgttttgctggatttttgttcttttttttcaaatgttttgaggcagttctttacatgtgaaacaagttatctctttatctggggtgtgagttacaactacttttcctctggcttgttttgcgctttgactttgcttctggtgattcccgcaattctgaaagtgtactttttgcatcattcattcttatacacccatgctcttgttcacgctggttcctctacctgagggctttttcttttctgcttctatctgggaacatttttttgagagagagtctcactctctcgcccaggctggagtagtgcaatggcgcgatcttagctcactgcaacctccacctcctgggttcaagcaattctcctgcctcagcctcccaagtagctgggattacaggagcccaccaccaagcccagctaatttgttgatttatttatttattttttgtagagatgggagtctcactatgttgcccaggctggtcttgaactcctgggctcaagcgatccacccacctcggccacccaaagtgctgggattacaggcgtaagccaccatgcccagcccatgtgtggaaatcttctgtttatccctttaggcttgattcttatgtcgttctcctccctccttcctggatactcctcttgttctttatcttactctacttgtcatgttaccttgtttctgcttataactagctgcctctcctatctgaggagggacttgtgactgttctcatctctgtactcccagctcctagtacatagcgcttgctcaacagatgtttggtgcattgatagataaatcactggtagctgttactaccagtcctgactccctgcagtgcttcagctgatcctgttccagatgtgcactgaatatccttctgttgaacaacagaaataaaggggatgggtgaggaggatagtcttcggtggccaaggatatttttaggtactttgcagcactcagcaatgaggagtgggctttagtcccccaagaactctcacagccctgggtgtctttactgttcagtgtcaaatccaagacaagtcaatgatcaggaaagaccatttttttttgttcagtgaagtttatttcagaatcattgaacagtatgatatttggtaatttcataaatattcccacttaaaatgatcggagcagatatattttcagtcgtaattaaaggacatgatttaaagagagcacaccagtccaaattgaaatgattccatagctattaaaaaactagggttttttacagacaatgatactttttgccccctttgaatagattagaccaatgaataaaacaaacaaacaaataaataaataaatagggaagcggttgctcatcagaatgtgggagcgaatgacagagggtttcttagaaccaaatgtggccgtggtttctgtcaggcgtgctttaagtgagtaggagaggtgagagaggcctggctcaacaaaagggctggggattgtccctgaagaaccagagctganttncatcaggagtaacanaggtagatagccgcgttgaggttccacgcagttcaaattatgtccaattatcaacattaatgcacattttcaatagaacctgttccggcttttcttaggaggggggcggggagacgttgttctctgggaataagtgtacgcaggaggctgagaaggcttcattccatagcattcacttacctccagctgtagagtgggcttatcatctttcaacacgcaggacaggtacagatttttttctttgaggcccaaggccacaggtattttgtcattactttcttctccttgtacaaaggacatggagaacaccactgaagaaagaagggggtcttgtggttagggacacagcagtgcagggtcaccccaacccctaggccccatgagtaggatacatgtaatttggtagcctctgtgggaacccacagtgaggttccttggcctaagacacaggataacttgacttctcacagacaatagcagggtcattttgttgatttagggtttcccctcaaaggcctgagggtttctcagagcctcatagcagtaggaacggagaatgaaagagggtctacattttaaatgctgaaggaaggaaggaaggaagccattgtgtcactggctggcaatgtgcccatccacaggagcggaacaacttgatcaatgtggaaggaaaggaaagaggtgaggctgtacttctgccagaaatcaggcaccagaactgtttcaggaacagagagtagcccatgggaagaaactgggagaggagaggctgagctgggaaagtggctccaaagagagacactcattttgatcttcctcagtcacagcagtgtcaattggaggccctgggatcactcttactacccgattccaaagaaacaggattttcttggcctggctgagagcaaatagcttccccctgagtgaggctgtccttcaaagtcagcagccttagttgcccacactcctgtgcagaggctttggctactgtggcacgatgccaggcagatcaccacagctaatgatgggttcaccgcacttgaaacttttgcccgttacagcggagagatataagttcctgctgggcggtaaaatttccctacaaggaaccacctggcattgggtgggacggatgttggggcaaggggggaagactggggagggggatggacacattatcgctccagcactcttgtttcagcctcaacaacaggaagagagaacccacaggcagttaggccatgtccatcaaatgaccccatattgtggaagaattgacattgcactatgcccaagagacttgggtggacatggtcctgggagtgcttgagccgtctaatttctcagggtcacactcctgttaacaaatgcactggccagtgcaatcaaatgtgccatttctaggaccaaagtttgtatattcctttttaatattttttttcacttgtgttgatcatttgccttaaattaactttctactttgtttaaaacatggagaattagcaagctgccaggaggccaggcagggaaaccaggatgtttccatttaccttgttgctccatatcctgtccctggaggtggagagctttcagttcatatggaccagacatcaccaagcttttttgctgtgagtcccggagcgtgcagttcagtgatcgtacaggtgcatcgtgcacataagcttcgttatcccatgtgtcgaagaagataggttctgaaatgtggagcacatgttgtttaggtataaaatcagaagggcaggcctcgtgaggcgaggtggcaaaatttgatttcttggaggacacctgagcatatacggtcaaagtctgatgacaacaccagtagggatgaagctgggagtggggtggctaagaacactggacctgacactattagacatgggttccagcttcaggtctattactgctcactgtggccgagcaacagagctacttaggtaaaatggtgatggtcataacactagcccacagggaggttacgaacctctggtgacaatgtaagtgaaaggcccctgagaaagagtgagggagttgcaaatgtcagtagccatcaagatcttctttaagaatagtttccactaaagagatgattgctttggtttccagccttctttgttttgtctccccgctgggccttctacctttaaagggctttggctctgggggaattgagttggctggggcttgatgacttccaagaggacacaagtggagatctactgcctgctcttggctaactaccttcttcaaagatgaagggaaagaaggtgctcaggtcattctcctggaaggtctgtgggcagggaaccagcatcttcctcagcttgtccatggccacaacaactgacgcggcctgcctgaagcccttgctgtagtggtggtcggagattcgtagctggatgccgccatccagagggcagaggtccaggtcctggaaggagcactgcggagagagcgagggagggagcctggtgaggtggtcctgccaggaaccatgctttgacatcagagagtagaaagctcagagaggaggaaagggcttgaaagaatcccgagcttctaaagatcatccctctctgggccaggcgtggtggctcatgcctgtaatcccagcactttgggaagccgaggtggatgaatcatttaggtcaggacttcaaaaccagcctggccaacatggcgaaaccccttctctactaaaaatacaaaaattagctgggtgtggtggggtgcacctgtaatcctagctattcaggagactgaggaaggagaatcgcttgaactcaggaggtggaggatgcagtaagccaagattgtaccactgcactccagcctgggcaacagagtgagactctgtctcataaaacaaaacaaaacaaaacaaaacaaaataaaataaaataaaataaaaagattatccctctctgaagctcaaggaggttaagggtgtactcaagggcacacagcaggttagaggcagactcaagattagaatgtgggctttctgacaccttacaggctattcttttagaataaatcccatttctactttgttcatcttttttgtacatgccccacctacaccatacatgtataccttctctatatctttttgtatccctaatgctgtcacactatgatttgctttttcatgcagatgaccataacattttccattcacctatgctcactcagcaagtattcaatttttctacactgttcttttttttcctttttcataacactgtctcataggcattctgcaaatcctgtgagagtactttttgtgaaatgttaccactttcctcttattcagagaagctccgtattaaggcttcactgaggttgccttaaggcatgataatggttcaaaggcttgaaagacagttaaagagacctgtaagtgcacaaaagaaagttgagcaggagagaatttcctgcctggagcagagccaagctgctggaagaggcaatgggggcaaaggccaggcagacaagccaatgggctcctcccacagctgcagccaacaagttatgccagtcttaaaacttctaaagaaatatgtttttaacaagattgaggactggattatgaggctaggggaggctatcacaaactggaataaaataaagccagagaaaagtggctgccttccaacctgcacaactgacctagctaggctgatggctgggccacctaggaaggctactgagcatcatataaaacagaagggacagcaggaatataacatggctctttgtaaggatgagtctgaaaaatgaccatttgctgcccaaatgcccttagctacaactgaaaatatttcagaactggaggttgcaggatgctggaatctcagagatcatccagctcagccctttatttttcagatgaggtccaaagcgggtaaaatgacttgtcaaggtcaaacagcaagtgaatggttttctttcaagtctcaattcatctttttgtttatatcatctatgtcttgttgttataagcttcaccccaggtagcaaaaaactattctactcaaaaggggtagacatatgttagttctcaagatcatctcttggtttcagagtttaactcaagtgattggcataggctgaatccatctcttaaaaggataatcaaatttatgttgaagacttggttgtcttcctactatgaaatgggaaacattatcactactcctcccctgtcaccaccaagtgtggccaccaccaccaacgttagtgagtgactgtggtgatatgatgaccaagtggccaggtcagcaagtggtgcagcctgtgtctcactggaagaggttaaagtctttctaaaacaaaataccatggcatcaaagtggcccagaactcccttctttgagctttccctgtgttagagcccttccttgggttgggagttaaacccatagtcttaccttcatctgtttagggccatcagcttcaaagaacaagtcatcctcattgccactgtaataaaaacagggacatgtctcaattatgtcttctaaacaggtttatttttccttccctgtgtacaagacttgactgttcataagaaactgcaaacagcctgcctctcaaagctgcctgaaacacctggcaagtttcacagtgatatgcgcagaacagtccagaaggcagattctaggcctggcaggtgggcaccctgggtgctccctgttggatcttgaggcctaacctctagcccagcagagtcagctaaaatctgagctctccctctccctccaagccacactttgcaaagggattccttgtattgtgggcttggaatcttttctccccatttgcctctgcaggaagcccttgcaacaacacatctggatagcctccaggtcccaaggctggagggacttgtaatgggaaagtagtctttaaatcagatttacttggcaccctgtttgccactgaaagaggcaatttaggggaaaaatctggtctccaagcacagataacactctactcttgaaagaggagacctgctcatgttactggtctcagcgtctccactgacctgtaataagccatcatttcactggcgagctcaggtacttctgccatggctgcttcagacacctgtgtaaaaaggagaaaatgagtgacttccccatgacggctacgttcatgtgtgatttctctcagcatccagtgcatggcagtcatgcaaagaaatgatctctgagtaaatgaatgaatgtgtgaaagagaagtcctttgggtctagagaaaagcatttgctaaaccaaaccccaactagcaatgtattggctaggagagctggagcagaggctttgacactaacctttagggtgtcagctgttagataagcagtatccattcccagaatatttcccgagtcataagcattatattacacctggcatttttgcaaaaagctgagagagggaggcagagagggaaggagagggagagacagagaaagaaagagagagagagagagaatatgcatacacacaaagaggcagagagacagagagactcccttagcacctagttgtaaggaagattaaagtcatacttgagcaatgaagattggctgaagagaatcccagagcagcctgttgtgccttgtgcctcgaagaggtttggtatctgccagtttctccctcgctgtttttatagctttcaaaagcagaagtaggaggctgagaaatttctctgttgaatacctgatttcacaatcaagttaaaggaaaggggaaaagagtattggtggaagcttcttaggggaggggactaataaactgagataattctctggttcatggaagggcaaggagtagcaaactatgacacattttgcaaatgtatcaccatgcaaatatgcattgttttcctgacaatcgttgtgcagttgatgtccacattaaaatactggattttcccacgttagaagaatgtttaaatttagtatatgtgggacaaagtggaagacacacagatttatacatgcacatacttttcttcattcacttctttgtacttaagtttaggaatcttcccacttacagatggataaatgggtacaatgaagggccaatagccctccctgtctgtattgagggtgtgggtctctaccttgggtgctgttctctgcctcgggagctctctgtcaattgcaggagcctctgaggagaaaattgacctttcttggctggggcagagaacatacggtatgcagggttcaggctcctgacggagttggggcaaccctggagataagctcacacaaccctgcaagaccaggtgctgttaccctagccaatctcatggatgaaccagatcaatgccagatgagctctgcctaaaatgattttttggtgaactctgaaaagtggaatattgtttctgtaagaatatccatctgagactctatctcttggtaataccaagagttatcagtttctctttaaccgagacaccagcaaagtgcctgctccagggtaatgcccaggggagccctccatttgtagaatgaatgagagtccaggttatgaacagtgcctggagtgtaggaacaccctcctttgcctctttgacaggtctgcatcataacactttttttttttttttgagacagagtctcactctgtcgcccaggctggagtgcagtggcacgatctcggccccctgcaagttccgcctcccgggttcacaccattctcctgcctcagcctccccagcagctgggactacaggcacctgccgccacgcccggctaattttttgtatttttagtagagacagggtttcaccatgttagccaggatggtctcgatctcctgaccttgtgatctgcccgcctcggcctcccaaagtgttgggattacaggcgtgagccaccgtgtccagcctgtaacacttcttatagcactgagttgaaaccttgctcctcctggttcctccaggaaactgaaatctttttgagccaagtctagcacagtgcctggcatgtacattcaggtggtagagtttgctgcttgaatgggtgaatgggaatttgacagcatttttattcaaattagtatgtgccaggtatcgtgctcgctctgcattatccaagggagtgagcctctgtgcaagtatttgagacacgagggaaataggttctactgtgggaaaaagagcatttcatggacttgctctccaagcagccttctgatttttaatttggctcccagtatcttgatatcaggagtcagtcacaagaactccatctttagtaagttatattttccacaggaaatctaaaagctgttcaacatgttagtttcctgtgaatttgataagccataatccattcctaacactgagccctcctgaaatttggtgtctggtcctgcagatagctaaaagccctgtctgggtggcctagggactcctctgttttgcctccacaggatccactttgcaaattaaccactggttctcccgttgtaggaactgccaccttcctcagagcctgtctttcttccttccttccttccttcctctttctttttctttctctctctctttctttcttttcttttctttctttctttctttctttctttctttctttctttctttctttctttcttcctttctttctctttctctctttctctctttctctttctttctttctctctccctccctccctctctctctttctttctttttctttcttttctcttttctttctctctttctttctccctccctctctctctttttctttgtctctccctcccttctctctctctttctctttctctctctctctctcctagacaggatctacctttatcccccaggctggagtgcagtggtacaatcatgcattcattgcatgatcacagcagcctcaaacccttcctcagagtctttatgcggcaaccagcagggtctggagggttggtggctctgtgaactctcctgacagaacacagagatgtctttggtctgttgatgtgattacaagctgaacgaaggaagatcaaagccagtgacaggaagggagatatgcaagggacccgagcatcagctctgagttagtccattctgcttctgggacttgggatacaggtcagaaaccttgagcttctacttctccatcttccaattgtagcatccaggacctcagaatctgccagctaagaggagccctaatgattgtctggtgggatatggtgggaccacagagatgaagacatgaatagctatttgaatgtgaacagcagacgaagaaatcaaggctaggagggtggaagtgactcatccaatagcacagtgtggttgaagcagcactagtatccaggttgcatgagcccctgatgctttcgctcgagggaaattttggagccatggggcaatgccccctgacgtaacagtctccacagttctgccatgtctcatcctggccctgtaacctggacccaaatctgctaccatcccatccatctcaggaagtgaaacctcttatgtcaaataggttgtgcaacgtatgtatcagatcctgtcttcccaaggagaccgctcaggccacagcacttccttccgatccccaatgagcagaaaatatctcgctataaacatagttggcactaagggagggagtggaagagtgatgatgatgtagatggtgatgtagccccaaggaagtggaacaagcagagatggggagctggaaatgccaggatgctccagcttttggggaattattcagctcttgagtcactaaagcctttctcagctgcaagttcctctttaccctgtcaggtcattcttccaagacaggagactgacatttattcaaagcagcaagtgccctgataccatcttgtgtctaatcatgggcttcgcagccagttatcaaggttgatctcatctcattggtcttcaatcattttgaacaagaagacaagcaaaataatcatgggttagttcttatattattgtgtgtacatgcagtgatgtctgttctttgtagtgagctgttccttccttgttcaccctcttgcttagaacagaactaagcaatctgcccccaacattttccccaatttcccatctcattcttggcactggcttcctaatatttgttcttatgagtcattttcttgtatcatttccatgagtccctctgggatcttaaagtatgaaaaatgttgtgtgtacccacacctgtctttgtggatatttctctcctttcccttctgcttctgggattatttgggaatgggcactatgatttttatcatatcgcttccacttcctttatggcatcatctccaatgggcttcttctccctcttggatccaggttctcagattggggacatgcagagtccaaggaacattccattctcctccctggtctagaacaaggagggcttagatatatgagcaggtggctggggctggcgagctatgtagtctccaatggcttttccctgatgtcggagttgttatgtcagttctgggagaccaataagaccttgtccttcctttggatccatcagaaaaagcccctgggtgggtaagatggatggcagggctctcctactctatgtcttttctcacacctagtgggtataagagaggggaccacaaacagagggggctctggtaccacttatccagggtctggaaacattttctgtaaagggccagataataaatgtttcaggtacaactactcaaccttgcatcatttcagaaaagcagtcagataatacataaatgaatgggtgtggctggacttgtcctgcggtcccctgtcttatatcattgtattatatcattttttcttacatacaaatttagaagcaatacttaaaaaaaaaaagccgtcctttattgagcacctactaagtgccaggtacctttttttccctcattatcttattaactcttcataataacctttaaagtagataatattgaaccatttgacctatgcagaaactgaggttgagacaataaattatttaagaccgcacaaacagtaaatgctggaactacgactcaaatatgggttaactgaaccaaaaccagatctttatttctcacttttaattgttacatatgtttattgcctcatctcctgtccacatggtgcccatcggcagactcctttctcattctcagtgattgagtgacattctaaactacattggcctggcagattcacctctgtcccctaaatgtttccacattgtccttttaggattgagatcctctctgttcccttgtcttccctcctttcttcttctggcggtgacgtgctgtgtgaatttgtttctttctcctctcagggtagtactgggactttccaaatcagggtttttagtgatctctcttcccttttctgagtttcttccttattcccattcactttctcatctataagtggcagctttgttgctggaggatttcctttgtccttttattcttctttaagactttgtcataactgtcaaaagcaatcccttgaaggtatctgtccttggaattgtgtgcttatgatgctgaaaaatactctcttcctaaagctattataaatgctggctagctgcaactcttgaatacaaacacattcagacatgcacacactttctggctcccaaaaagaaaaaaaaaaatcaatttataataattctgatcctttgcttatttccacaaactccatgaaaattgtacattgtccaagcaacatttcttaatattctctttttctctcatatccattttccttactgctgtctccacctatctcttccaaactccctgttaaaatccctgccccagcgaacttttattcaattttgtggaatggaggctgcactgatttaaattaaaaaaaaaaaaaaaatccctactccatgtcccagatccctagttgttttttgttttttgttttcctgagacagggtcttgtgtcttccatgctggagtgcagtggcatgatcatggctcactgcagcctcaacctcctgggctcaagtaattctcttgcctcagcctccccagtagctgggagttcaggtatgtgctaccatgcctagctaatttttttcttttattttgtagagacacggtcttgccaggttgcccaggctggtctagaacccctgggcggacgtgatccgcctgcctcggcctcccaaagtgctgggattacaggcgtgagccactgctcccggccttgggtgcaaatttgagctttctcacttattagtgtaagacatacagctaatttctaaatcttccaaacctcagatttttcatccatgaagtgaggattattatagagctcactaataacatggcttcaaaaatatataatgccaaaattgagatcaaaataataaatctatattacatgggagatcttaatgtacctcttatattattgatagactaagatgatcaaaaaaatagaaagagagcagtaaggagagcaagcatttaatcaataggaccaatacattttaatcaataggatcctcaggaatatatacagaataccaaacctaacaactgcagaaaacatgccaaacatttaggtacagacattgttggaaaatgcaatcttgaaacgagtggactgacattcagaagatattaataagagcactaatgatggggattgcaaccatgtctttactgacttccagaagcttcttacagtaaacatgaaatcacataatttcttccactttcctactgtttcttgttctgggctctgtcctgcttactgtctaatatcttggccccttaaaagttgctaatcttccaaacctcattcctgtgactgggccgctggtccttgttcatgggccttgaaaatactgactgtacacttatctggagcatccagtgcctaccacctgacccagattcctcattgcgctcctccctcctccacctattggaatttgctcatacccgtgtgagacccctccctttccccccatctgaatttttatcaagacaacgcactgccatactccctcgtaccctgctctgggcatcagactgaatgtttgtttccattgaggatctgcagctgcatcagtttccccagcaccgtccaaccccttgagcatggctagtcctaaagcagagaattagcctttctatccctgctgctatacatgctgggacaaataataagaaatgacagcattttatgataatgcaggctgcaggaggcaggaggcaggaatcaaattcgtgcttatcaaatagtgctccaattctttgaatattggactatagaatatgtcatggatctatgctcaggtgggttccctattactcactccactgaggccaggttgtgggattagctgtccaagagggagtttcagtctcacagcatagggtcattctgagaattactggcccacacttgtgtggagacctccagagaacagaatctgggttggtgccatgtacttccaggaggagagaagtggcaggatgcccagccccacaatcagaggggaaggggcagagccacatgtatgaagatcctctccccagtacgtgccaatcacagggcttcctagcttttgggccaaggaaacaatgtgggaagcaaaaaaggacaattttctcctccctttgcatgaagactgagcagttttaccagattcccagggaaacacccttccactctgggttgaatgtgagtgagagacattcagctggaacactagaaaaactatttcctgagccactcacctttagccctagaaagtgttggatttgtccttcatctttgccacagtagagactgctgatagcatcagaacttgggctctggaattagacagatatgggtacaaatctgagctctctcacttattagtgtgggatgtagagcaacttttaaaatccttccaaacctcagacttctcatgcatgatgtgaggattgtaatagggcccacctaataggggtttttgagaattaaaaaagttattcaatgaacagcatttagcaagatgcctgaccattgagaaaataacaaattgtttattattattgttattattaaacatctttcctgcaccttctgactgggggcatcgtatcatcagaaatacttaggatgggatggattcctgcatgggctgagtcaagggtgcaataatggaggagtgaagaaggaagaaatggaggcagaaatccccaggagcccagcatggtacaaggctgagctagtgctgcagagcctccttggaacagccacagagcttgcatctggccctgggaggaacctcttctagctggcaggaccagccacaacagtggccaggggatttcccagggcgtgggctcctaggagttcatttggaccaagcctgcctggagaggggttataacagggatccttccctactggcaggtgatttacccctcggtgagaagctcaggcatttgtttgatggaaggtggaaggccctgtgctgggccagtgactatcagggatgggcgggtggctggaaaatagcaaataagacaatatgataacacagttaaccaccacactatgtgaagctacaatatgggtatctgtaatagacaattccaatgtagagaataattctaaggtgtcattctccccgccaatgccataagcacacggcctctgcctgggtttctcactgtggaatgtcctcctggtctcctcatgcccagagagtgggaagtactcctactttaacaccggctttcctgtcatctccctgcagccctcctcagccccctctgcacagggaggtttcctccctgctgctgcagtgctttgtacttgttagtggtacctgcacacaggtattggtgtccttgtctcaccaccctacatcactgtaagctccccaggagcaggcttcctgtttgactcacctgtgatcctccacctcccaccctgtagtgcctcaagcattgaggacaatcactggctgccccttaacccagaaatgctgccgagacaggaggccatggcccaagttcctggaatggggtattactatgtcagcacaaaggcctttgcacaaatgaaggctttaaaaatgcagtcctagtcaggtggaggagggcttataggattcccaggaatctggatcattctcttgagagctttcccttgtctctgttaaaactcacatcctacggcccaaataacaacaaaaaatggatgtaaattcttgaaataacttgtggatgggggaacaaggcccaccccccagatctgccagaagcttcaggtgagggtcccaaatgccaaaaagtctggtatcagagaggatggccagtgacctggggacacatgccctttgctgtgtcactcaaggagcagcagcctcggccccgcacagtgaccaggaccctggcttcccacgctgggcaggagctggtgtctgatgaagggaatgcctggcagcacgtgctgtctgtctcctcgtgtcagcttacctggctttgctgcgaagaggccactcgcatttctcaattttttatatttttttaattttttaaattttttattttatttttatttttatttatttatttatttttaatttttttttaattttttaaattatgctttaagttttagggtacatgtgcacattgtgcaggttagttacatacgcatacatgcgccatgctggtgcgctgcacccactaactcgtcatctagcattaggtatatctcccagtgctatccctcccccctccccccaccccacaacagtccccagaatgtgatgttccccttcctgtgtccatgtgatctcattgaatttctttaaaggtggaatctctcagtggggtctaatctgttcagaaatatcaaaagagtatccttgggaatgactggaattccagagtcatctggtaatcctcataaaacaactcctggatgtctctcagcacatctcccaccttgaacgcaggaggctggttcaaatggaggagcatcgctctactgcacttttttttttttttggcctaaagtgcaaaaggggatacgtttcatgtaaataaatcaactgcaaatcgctagttatgctgagccctgtcccgtgctgtggacacaaaggaaccaaaggcttttctccccgcccaacacacacataacacacacacaaaatcataaaaacatacatacccccaacacataacaacacacaacacacacacaaaatatatacacacaacacacaccaaacatgcccacaaacctgtgtccagagatagatcctactggtgggtttgtggtctcgctgacttcaagaatgaagccgtggaccttcgcagtgagtgttacagctcttaaagatggcatggatccaaagagtgagcagtagcaacgtttactgtgaagagcaaaaggacaaagcttccacaacccagaaggggaccccagcagggttgctggttggggtggccagcttttacttccttttggcccctcccatgttctgtttccatcctatcagagtgcccttttttcaatcctccctgtgattggctacttttagaatcctgctgattggtgcattttacagagtgctgattggtgcgttttacaatccccttgtaagacagaaaagttcctgattggtgtgttttacaatcctcttgtaagacagaaaagttccccaagtccccactggacccaggaagtccacgtggcctcacctttcaactccataatggcatgaaaatacatatgttgtacaaaacatacatacacaaagtatacatgcatctccccaaatatacacataccacagaaacatacacacaggaactcagctacctgtcaaaagtctgcatggtgattgcctctgcagtgagtagttagaaaagtgaatttgtttttcaataaattggagtccttaaaaatcgttgtaagatagaaaatttttaaaagtatataaaataaaatatgtatgtcctttggtctagcatttacacatgtaggaatttatcctagtggagtaatcaatgatatatgcaaagatttggacaagcatattaagcacagaattatgtatgcatatgtgtgtgtatatatatatatatctcatacatataataatgtaaaagtgaaaataactcagatgttcaaaattgaggattagttagactatgatctgtccatatgtgacatacaagttagctgccccttattctctcgagcttcaacctcctataaacagtgtcccttgtatatcagtattggtacagataatcgaacttattgaggttttacatggggcaataaaggcaagagtttatgaatactccatactacactaggtagcaccccctattaaagacaaactcttctctctcatttcccttcctttccggaaccacttggttgaatctctacaagtctctattgcaactgcctcaacatggcaccctccctgcatctccatcttccctgtcctgagagcaatggcctgctgcccccacactcacatcctcattcattccagaagtgagcaccacagaagtgcctacagttaccccaaccaccttcttagaagataagttagtgtttgttttgactttttaaaatttttacttcctcttttccttcacaatctcatcccatcccaagaggtttatcaagaagttctctaaagatatgtgtctccttatggaatttaacagaaatcagggatttgtattctagccatcaagggaataacatttttccaggtctttagacaaataatggaataccttgcagtaattagatacactattgtagaaaagtattgatgaaatggaacgatgtttgagatatcatattgagtagaaaaggcaagatacattaagtaggaaatgtatcttacaaaataatttgtcagacacactcctatatttgtatgttatataaatgcgtatgtgaagaaaggctagaggatgagaccacagtcttcggtgaagtttaagagatgatgctgcagcatgctcagaaaggcttggtatagttttttccagtaattaaggactgatcttaggtaaattgtccatcctctctaaactgcaccaccttttgtctgtaaaacaggaaggatggtatttacccccagggtcatcaaaggatttggttggagaaaaataaataaatgggctgagcccagacctggcacagtgagagcacagtggttgactattgtgctggcctgttgttcctgtgttattgacatgctgctggtggtggtccagaagctattaccttaattggttatgtggatttcccctcatactgagcagctgtgtgtggtgttgtaaaacatagccatacacagtaactgacaagggcaaatgtgatggaaaaatgcaaggaagtgcagataaatagctaatgggctgtagaaggaagctagtccttggagggcttgatcaaggaaggtccttttgcatgtcacctttgaagaagaggggacatagaagaggtatagtgcatcccggagtgtacctggaagggaacatgaaaagaggacatttttctctgggacatggggactccacttgcatgaactctggaattggggcaaagaaccatcatgagaacaagggcttccttgaacctcccaggctcattggctgatctaaaccctgtgtcccctctttccttcactctcctctgttttctatacctgtattattggactggactggaagccacctgatctatcacaagtaccttgaaatgtgttgaataggtgtggcacagtccttagcagagtggcactacccccacaggaatttgtttatacctttggcatggaaaatagcaggaaatgagtgatcactgataactgaggatgctatttattattggccaaaggaatacttgtgttgtatttgcataaccactcacaaactgttgattacaaatgagtaccagacctagctccttcaagtaaaggatcttgagaactgaaggcaaacagagctccaggagtccaagacagagccacagaccacgaggatccctggcccaggtaggtggtcctcctgcactggctttcaaggccaacaggatggatggggaagtagagtagcatctggccatctagacccttgctttttatccccactggaagcacatctgaatttctaaatatgatctctgagacctgcccagaacaccttgctctcagccccagtagcagcctgctctctcccaggagggcttccactaacaagtagggcattgctggagggccaggcagacactagcttaggaaatccaccaaccctggaaatgctagtcccttctctgaaggctcagaagactgactttagagtctagaaaatattggtccttgggaacagattttgagtgcaaagagatggacttcagatggccagatgcactgcttctttagggaattctgtgaaagctccctgcatttatcttaatacaggcagcagatttcatgagtacccccgagggatggccccaggtcctccagcctgtgagcatccttctgtccttcagcagcaccacagtatctttatatgtctttggatacctacgtttctgccagacatctcttgctctgatgttctggctgccaaattctctgtcaagcgcctccaattttttgtgtcctttgatttaccccaacatgacaaaggcagttgtgcttcatgtattcagggatactgccaaaccacaaacaggttaaaatcaaatagcagatatccctgttcctaaagacccatcagctctacccacctgctcctgctcaccgtccttattgttgagtcctgaagcccttccttgtcatttttattttttgcatgaacaatttagttccctttgtctcactcctaaacctttctcaaaggattggatttgtacacaaactgcctatctctgcaatcttagaagtgatatgattctgaacaaatcacttaacttttgattttttattggtaagatgggaataccaatttttgctccacttctgtcctatgttggcctgggctgatgttgaaagctctcggtcaactgagatagggtgtgcagaatttatatatataaatatatctcctccaacccctcccaatgaagcaagtcacgtgagtcaatcctaccctaagatattagggattgagcctcctgggacatttggtggcttaggttttcatgaaaagaggttgcagagcaactgctttttgttaggcaaagattaggctactgcagagactcagcaaacttctatagaaggtgtcagatggtaagtattttaggctttgcttgccagatgatctctcaactagttaaccatgctattgtagcctcgaagcagccagagacgatctgtaaacaagagcatgtagtgttggcataaatatagtaccgcggcaataagtctatttactgtaaagttaatcaaatttacatttcagaacacttaatctgcaagagtcctttccaagaccctatacctaattttgtgtttacaattttatatttgttttcttaaagaagaccaccaatataaactatatccagccttcatgataagtacataagaaactatgcaaataagggggaaaaaaaacaaagaaaaatacctagtttactaatggttcacttctgaatagcacatattcataatgatacaagcactcattactagtctaggaaaatgaagatataattgcattaggaagatcaagaggtaggaaatgtggatgtgtgtggtatagactagggcaggacaaagaacctaaatcctcattttctaaagataattgttaatacgtaaaactcaaaattcaagaagtaacagtaaaagcggtcattaagaaacaagcactaaacaccagataggaagcgagagatgggggaagagggcaagaatctgattattttttgcaacaaattttgtaaaaccatttgactgtttacatgtagaacttggatcttttttaaaaaacacaaaataataatactattattttttaactggatttttgaaaaagaagataaaagtctcattttagtaattaaaactcattccaggttagtccactcaaaacttatattcgaaaattaaaactttgggaggctgaggcaggcagatcacctgaggttgggagttcgagaccagcctgaccaacacggagaaaccccgtctctactaaaaatacaaaattagctgggcgttgtgcatgcctgtaatcccagctactcgggaggctgaggcaggagaattgcttgaacccgggaggcagaggttgcagtgagccgagatcacaccattgcactccagcctgggcaacaagagtgaaactccatctcaaaaaaaaaaaaaaaaaaaaattaaaacctctggaagttgagtttgcagatattcattatgctcatttttaacttgtatgtttggaaaatgtcatgatgagaattgaggttgggggatgagaaaaaaagaaaaacatcaaccccacagcccattcaattttcagcccgacccacagctccggggaagggcagcaggtccatccttcactctttcttcacctctttcccctccttctggctcttccacctctaagttggagcccaagaagaggcactgggaaatggaaaagtcttttgtacgtggtacttgccggggaagctgccatgaagacctggccccacggtggggagggaatgcccagctgaggcctcgtgcccatgctaggatagactcgtccagacatgtcaggtggtctgacagggcaagcagcaggaagtcatgtatgagtatgaactgatctgtatgcaagggcggggagaacacgcggaggaatggggcgtgagaaaacagcacagtacgtttctttagcagctgtctctgctcagccatgggagtcaccagagaaagaggcttggaggcgttattttcactgtgagatgtgagtgtaaaaaagtgcccaagacacagtgagtaccagggagatgccctctttccctacccgaatgcagaatggccacaggccttaaaacacacacatggttcctcagaggagagaggcctccacagtggacacccgcattctcccctggtcagcagcagcagggcgagtgctgggccatcatgaagcttcacaggcaatgagctctcagcaataacaggaacagtgcctgggggactgtagctgcaagaccgattttcatgtaagatggcctctgaggactccgagatacaccaggctgagactagctggcagctccaagttcttggtcagaagagaacaggaactagggaaattggaattactgttactacaattcctttacatccgcacaaccatgaggtccagagagtctctcttattttttttttaaagacagggtctcactctgtcgcccagcctagagtgcactggtgtgatcatggttcagtacagtcttcacctcccaggctcaagtgaccctcctgcctcagcctctcaagtggctgggacagcagttgcatgctaccaggcctggctttttttttttttttttttttttttttttttcggtagagactgggtctctctgtattgcccaggctagtctcgaactcctgggctcaagtgatcctctggcctcagcctcccaaagtgttggaattacaggcatgagacactgcacccagccagtatagtcttttaacagctttattgaggtacggctaacattgaaaaaactacacaaatgtaaagtatgcaatttgataattttgacaaatgtacacaccagtgaaactatcactacagtcaaaataatgaacatatccatcactcccaatttcctcacgccccttggtaacccctctctcccaactccctgccccctaacatcagacaactactgatgcattctgtctccataggctcatttacattttctagaattttacataaataaaatgacagagtatatactccttcatgtatggcttctttcagcccaattatgtcaagattcatgcttatggctgtgcgtatccttagcccatctctttgtcttgctgagtaggataccattgcatagacagaccacagcttgctcatccattcactcttgacaacgttgaattgtctctgttttttgcaatgacaaataaggttgctatgtacattcctgtatagacatttgtaaaagcacagcatttcatttctcttgggtaaagacctaaaagtggaaaggctgagtcatatggtaaatatatatgtctaactttttaagaaactgtcaaactgttacccaaagggattgtacaattttacatccccaccagcagtgtatgaaaattcccgtacttccacatcctcaccaatatatggtgtggtcaatctttttaattttggacatgntaatgagtgcaaaatgaggcccagagtgtctgaagttacatttgtatcctttttggcatccaaaacaggtgtcaagcatagaaaaaacacttgttccttgaatggtcagtcatttacaagtggaattcattacaaaccggtagttctactgggttaaactatgccttactgtcaacaggcacatacacatacagacagacaggaaggcacagagacaaggcagagcattgataagaaggtgacctgggctctagctctggcctatcacctagtaaaatattagttaagtagccatgagtaactcacttaacttaccacaggctccattttcttatctgtaaaataggaacattgaaacagctaatccccaaggtttgtggataatcagaattacaaagatcaatgacatttctatgagagaaacatatttccaagtatttgatggagtacatcagacacaaaggaaaggaaactgaatatttttgaggttttttttttttaccaagaaattcacattttgttaaattttcagaactacctcctgaggaaagtgtagctgcacccatttagaatgatagaaaacatcaatctgtctgattccaaagccaagttcttgctacaacgagaaatgaaacaactggatccctacagatgcagagacctgggccccacaaatgtgaattctgttcccctaccgaatagagttacagttccataatacagtactccctcacttttccacagtctcacattccacagtttcagttacccacagtcaactgcaatccaaaaatattaatgaaaaattccaaaaataaacaattcagaagttttaaattgtgctccattctgagtagcgtgataaaatcttgtgccaccatcccacctgtccagcttatcgttagtcattgacatcgtctgctcctgacatccaaccattgacatcatcatgactctatgatccaggatcaccgaagcagatgaccctccttctgacatatcatcaggccaatatcagcctaaacactgcatcactatgcccacatcagtcacctcacttcatctcatcaaggaggcaatggatcacctcacatcatcacaagaagaagagtgggtatagaacaataagataattttggggcaggcatggtggctcacgcttgtaatcccaatactttgggaggccaaggcaggaggatcccttgggcccaggcattcaaaaccagcctgggaaacatagtgagacctcctctctctgcaaaaaaaaataaacaaaattatccagatacagtggtgcatgcctgtggtcccagctactcaggaggctaaagtgggaggatcacttggtcccaggaggtcgaggcagcagtaagctgtgatcgtgccactgcactccagcctgggcaataaagtgagaccctgtctcaaaaaaaaaaggtaattttgagaaagagaccacattcatacaacttttattatagtatattgttagaattgttctatttcattacttattgttgttaatttctttctttgcctaatttttttttttttttttgagtcggagtttcactcttgttgcccaggctgtagtgcaatgagacgatctcagctcaccgcaaatcccgcctcccgggttcaagtgattctcctgcctcagcctcccgagtagctgggattacaggcgcctgccaccatgcccagctaattttgtatttttagtagaggcggggtttctccatgttggtcaggctggtctcgaactcctgacctcaggtgaggcctcagcctcctaaagtgctgggattacaggcttgagccactgcgcctggcctctttgcctaatttataaattaaacattgtcacaggcatgtattaatttataggaaaatcatagacatatagagttgggtactatccacagtttcaggcattcactgaggggcttggaacacgccctcctcagatgaggggggactactgtcatctcctcaatcattcttgattcaatcctcaacacaaatggtttggccaggtcttgcctctggagacaaaattgctaaggatttagaggggaaaaaatgtagttcactgggaaagtcacctctgctccactggacagcaacttaaaacccaggccatgacaagtagaaaggccacccccactctccttcacacctggagtattcaggagtcaatcatatttcaggaccaccaggagcaaactgggaaaaactgagctgccttgaggaaagcaatcagctccacaaggggcttaagaaacaagctctgggaggagtggttggagaagagttggggacacatcagaaatgccatcaaatttctaagggctacctcgtggtgtcagacctgtgcatcttcaaggacataaacagatgggataagcagatgagattcacagaggacatcaaaatattggctccccagaagggagaacattctagtaacagagctgcccagctgcagagtggactgtttcacaaagcaacaggtgccctgcctcttgaatcaccatcttcacaggaatgcagtagaagggacttaactcctgccctgaagaaaaggttaggctagggaaacagctccaaaattttttaaaaggaagcaacataggcatctactgggagttttctaaagcctttgtttaatgaaactaaagagctgggacaggaaatgccaaattaaattaatagagccttgctttaagacaatgcaagtggatggtaatgaaggaatgagtcttaggccttggatcaaccgtattaagcaatgctgagcatggagccaattctgttcactagatttgctcagaaagggccagacgagaaggatttttctaaaggcacctactaccaaaaagctgccaaggcgtccaatggagcccagagagaatatgctaacaataaaaagttgaacaccctcaataaaaaagggtaaaagtaattaatagaaaattactgaaagcttttttgaaaccaaaagtagtcagcattggtaaaagtctacaaaagtggacactttcatataatgttggcaggagggtaaaaagacataacctttttggaggacaatttggcaacagagtaccaaaaaccttacaattgaagagaactttggcctgagtgcagtggctcacacctgtaatgccaacactttggaaggccaaggtgggaggattgcttgagcccaaaagtttgagaccagcctggggtaacacagtaagacctcgtctctatgaaaaataagaaaagttagctgggcatggtggcatgtgcctgtggtcccaactacttgagagactgaggcaggaggatcgcttgagcctcggaggtcaaggctgctgtgagccatgttcatgcgactgttctccagtctgggtgacagaatgagaccctgtctcaccagaaaaacaaggcaagagagagagagagagagaaggagagaaagaaaagaaagaaagaaagaaagaaagatggaaggaaggaaagagaagaaagaaagaagaaagaaagaaagaaagaaagaaagaaagaaagaaagaaagaaagaaagagaaagaaagagaaagaaagggagagaaagaaggaaggaaggaaagaaagaaagcaagcaagcaggaaaggaaggaaggaaggaaggaaggaaggaagaaagaaaaagaaagaaagaaagaaagaaagaaagaaagaaagaaagaaagaaagagaaagaaagaaaaagggagagggaaagggaaaagaaaaggacaaagaaaagacctttgaaccctgaatttcacttttagagattcatcttaaggaaattcattccaatagaaatttatccccaggattatctaaatatttgcttttattttcttctagtaattttatggtttaactttctcatgtttaagcctttaatttatttggaatttattttggtatgagaaagtgtgacctttttttgttttactttaaaaaaaatgtattacgattattattttagagacagggtcttgctctgtcacccaggctagagtgcagtggtgtgatcatagctcactgcagccttgaactcctggcctcaagcaattctccctcttcaacttaggagtagctgggaccacaggcatgtaccaccatgcccaactaattttttttattttttgtagagacagagtcttgcttgttgcccagtcttgcaatgttgtctcaaactcctgggctcaagtgatcctgtcgccccagcctcccaaagcactgggattacacgtgtgagccactgcgcccagctgcctttttattttttaatttttcagatgctttgttggttccaaaatagcacttattaacccacgctttccccctctggttttaaatactgcaagtttggctttgaaatacaacccactgccttattcaggctacattcaaggaaatctgagaccaagagtctgaaggcccagtttccttcctcaaacccaggaggtggtaaatgtgtcacttccacactttctatctatttctaagaactccttctttccaaactctgacatgcccctggctcaggtctatagaaattcccagggtccacagacaaagcagaactcacttatggggaaatctgggaaatacttatctgttaaacctgccccatatggtgactcagattgtctaaagcccaaagcatcattttccaccccaaaccatttcctcctccagacttctctatttctgtggtccagagtcaagatcttgatattaccctagagtcccccttctgctctcctgcatacccagatgcccctccctccccagatccattctcccaccctccctcccatcagtttggtgggcccatcaccgcttcccctggcccaggctctccttttgtgcgcttggagcagcagactgatctcccagccttcactcacttcatgtggtaatctgttgtgttcatcactgtcagaatcttctgcatcccctcactactctgctgaaaacactctagtggttcctcattgctcattaatgaaagtctagatattaaacgtagaaggcccagcacaatttgcccctatgccacctacctctctaatcttttctccttactctgacagactctccgtctgtcatttatgtattcttttattgctctcttctacttttagtatgaactggatttatggatttttttaacattgctttcaagtatggaataaagaattttatttatttatttatttatttatttgagactgggtctcactctgttgcccaggccagaatgcaatggtgcagtcatatctcactgtaacctcgaattcctaggctcaagccatcctcctgcctcagcctcctaagtagctatgactacgggtgtgcatcaccacatctggctaatggaataaaatattacaatgcctaatcttaattttcaaaattttaaattacattgtacctaatgcccatgcatttacttttttcagtgggtcaatagccctcactttggcaaaggtcccaggcccaaggtaaggccttactttttccaaactcatcttttgaaagacataagtgcctgtaagttgtaccacattaggttctaggaatttttcatcaaagactttatcagactattttcctctaagttgagaaagagctgggggcagaatatggcactgaatgactgaagagaaggcactgaaatcaggccagaggttgctggaaagagcaatgaggaacaccagcagcaatgaggagccggtgatgattttggcttcacagggaggtgtgtaccacaccgattttatctctacgtggatgaaccacagctgtcggctcccttgtctccaggacatcacactctccacattccctcccatcttccggcttctgcttcccggggccctcatctgccccatcctgggtgaacactggtcggtcaactgctgggcgtaccttcccgctctgcacaccctccctggccaccccacccactctcacggctcgcactgcagaggagccgcatctctagctccagcccatctgcctcttctgagctctaacttcatgtaggcgactcctgccggtgttgcctcacaggcccatcatacttcaaagcattttcccctcagaacaccatgtcctggctgctccctccagaagatacatctctcaagcacatccccgcggctctcacctggatgactgcattcaccttctcccacatttgccctcctttggatgtatatagattgttttaaaatacaaatctgatgtgcttgctctcctgcttgaaacacctcaaaactgccttcaggataaaccactgcccttgacatgttcacaggttgcccatggcctggccctgcccatctcttcagcctcatctcatgccccttgcccctcgctctctgggcttctgcctccctagccctcctttaggttctctaacacaccatagtccttctagtgttggggcctctgcaagtgctgttcccattgcctgagacatgaatccctctccctatctctacctgcaccttcatctgattaatccctacccttcctactcatgatgttgctttctcagggactctctctgactttttaaactaatcagggtctccccagtatatatcttcatagcactctgtattactcctttcttaatgaccacctgctgtagactgaatgtttgtcttcctccaaaattcatatgttaaaacctagccccaaatgtgataatatttggaggaaggctctttgggaggcagagccctcatgaatgggattagtagccttataaaagagacccctgagggctcccttgtcccctccaccgtgtaaggatgcaacaagaaagtatggtctatgatccaaaaagcagacccttgccaggtacccaatatgctggcacttgaacttcccagcctccagaactgtgagaaataaatttctatttttcataagccaccgagtctatggtattttgttataggagcacaaacagactgatgtgccacccaaccatgattatacgtgtaatttatggtttctctgctagtagggatgcaccatggggttaggaaccacgcttttcttatttcccacacagtccttagctctaagcatgttcctgaatcaaagatccccatcttttatgaatgaaggagtcagtgaatgaattaatgaaagaactgataaccctcaataattattccagccttttatacctactattaacaagcttgcattctactccaaatttattgggctttaactctatttttggccagccacatttgacattccctgaagtaaatctatgctttccatcctaagtcaaggaaggacctggactagtagggccaagaaaggtctaaattccatgggtgggagagagagactaaatctgaaaggaagaatagattgagcaaaggtgtagagattggggaaggctggacatttggagagaaggaaaaggaaactgacactaaaccaaacagtctcacaaacacaatctcatccttccaaaactctgtgaagtaagaattactatcccagggccaggcacagtggcccatgcctgtaatcccagcactttgggaggccaaggtgggtggatcacctgaagtcaggagttcaagaccaacctgatcaacatggtgaaaccccatctctactaaaaatacaaaattagctgggcatggtggtgcacacctgtaatcccagctacttgggaggctgaggcaggagaatcatttgaacctgggaggtggaggttgcagtgagcagagatcgtgccactgcactccagcctgggtgacagggagactccgtctcaaaaaaaaaaaaacaaaaaaaaaaccaaaaaaaaaacaaaaaacaagaattactatcccagttttgcagatgaggcaatggaagctctaaaaagttaagtaggagaaacaaacatgaaatgtatgtcttatgcttttcctcatcctatttcctcagcctggaatgtccattctccctccactatgcaaatctaactcttcaagctaacacatagcaatgtctgagaaaccgtccctgtgttcactctgttagcctcacttgctccctccccatccctctgtttcctttctgttataacacttctctattctgctggcatcacagtcatctccacctgccttcctcacaagttaaaagcttgttaagggcaagtggtgttctttgccacctcattccccagggcttctaacacagtgcctcatgcatgacagagttgtaaaacaggttaccaagctggcttcaggcaggtttgcatggaactgtgctttacaggaatacctgctccccccaggccctgggtcttcctcctgagtccaggctcagactctctcatcctgctcgttctctcttggggagccacagtaactttgagcaactttgcatgggatagaatggcctattaggggcagcacaaagaccccatggagggaagagtacagaaagggaaaacgataatcatatttttttaagatgtgcattttcttaacaaaatgctctagtacttgtccagactttcaaactcaaaaacctaagcgtccttttcttgaagatcatcaaaggccccagtggtccttcaggtatgtcaagctttctagaaaataaaggtaagtcataatcacttaacacacatggctaaatggccatttccttctaatttatcagcaactgttacatatttctatactagaaaaaatttatatttatactcagggtggtaagttaaatttgccatcgaagtaaagcagaaagagcgtagcatgtatgtatatgtaactcaactgtgcatgagacaaagatgtcttgaggagaatgagtctaagatgcgcctgagcaatagtaccc

SEQ ID NO: 87 - DNA, 176373 bp, Homo Sapiens
  misc_feature (1)..(176373): n = A,T,C or G
gcacccatgtttctaaagggcataccagccataataacaggatgggtgaggatatagacagcagatgacagagaggagagtgaaagctgggaatcccagctaaaggcatcaggtttatggaatgagtaggggacaatactgtgtgtgtttatacacacatgtatatgtgtgtatatgtatacatgtttatgtatatatataattatatggtaccatttctaattgacaaaataatctatcacattttacattatcagattttacatctattgttctaaatacactcagtcatcagccctgtgtgtgggctcttacccatccccatgcacacctcagctcaaccactgatggatggatcatctgcctatcagaggtggcatattcaggtgaatccatggccacagctgcagcacttcctacccacgcagaaaggctccacaagaggaggcacacccgctctgactgtccctaagctcctgacatcttcaccccatgaaactgctgctcctgggtgcttcctgccttgccctgcccacccttgtactgttctcaccattgacacagctggtgcccgatgcacnaaaacgaatcgtcactattgaagcctgtctctcancggatcgtgactaagaaccccctccttgcttcaagttgtcctgcctttctaggcagagccaccctacatcttaaatatattgattgatgacttacgtctccctaaaatatataaaaccaagctgtgctcttaccaacttgggcacatgtggtcaagacctcctgatgctcttgtcatgagtgggtgggtgttctcaaccttggaaaaataaactttctaaattaactgagacctgggtcagatttttggggttcacagcaacaatttaaaaaactcaccattgacctgaaattttgaccttatgctgttcctcacactcctccatgaaaatagacgccatcctatgagttccctcagccatgtcatgccacacttccaacatgtgtccccatccaccatctgtcttcttattgctgcatcctacccaggccctgatctctggacccattgttgtataattaagaatttggggctgggcatcgtggctgtggctcactcctgtgatctcaacattttgggaaggtgtattagtcaggattcctccgaaggatgcaaccctagggatcctctctatgaccctatgtctacgcgctcaaccgaccgatttgcgcgaacctgcccatgcccgaggacagtgtaatcctaaaacgtcccctgaatcataaggatatgagtgcgaaagtacggttccctctgtcaccactttctaacaacgctatgtccgatccgtgcactaaccccgcccaagtcactgaaacactgatgggcgcttcctctacaggtatccagggccaataccactactcccctcctccctgtcccccttccactctctagaggccgcggatgccatcctctattagcacaaccgaaaacgacggtgaaagtaccacgaagctcacgatctgatcggtcgcccaatgcggttacaacggctgtcatcccaacccccgtcccatcctccatattgcccccccctatgaggatggccctatcatcatgacctccaaaattctgtcatctcccgacgtaatgccgcccctcgaacgcctgacaccatcaagtcngtcacctcccaaaatactcctcctaatcaccaggccgagtatccccggttccacaatacctccttgagacgggccgatatcacacacnggagtttaggtcaactagtaacaagtgggatttgcgactcaggtctatctaatcctcaaacccacgtcctggacccctacacagactgccctccctcagtcctctgtgtggcctcaagaagggtctggacattcaagtttaaaaatccatccaaagaatctatggacccagtggtctctggagtcaatgttctgaggctcagaagggccaggcaggagggagccgcctctacacagtcctgagcagagtgggctgtgtcccggcacagcaggggagatcataaacagaattctgccctgggccctatttaagtaggacctttaggctgccggtgtcatgaccacaggtcccangtctgcacgattggctgtgtgtggaaaatcttcactccttgcggccttgtccttggcagagagcaccgctgcttcctctgatggccaccagggggaggcgctcccctgggaacggtttgaangggagcctcaccccacacgtgccttccgtggtacccagcaccagctgctacccatggttacccacaggcccagctctgctctgaagaaggaggagtggtggcgatcangccttgtctgcatcccgtggctgcccctttcttttctttgggagctaaccgctcactgggattacaggtacgcaccaccacgcctggctaattttgtatttttagtagagacggggtttctccgtgttggtaaggctggtctcgaactcccaacctcagttgatctgcccgcctcagcctcccaaagtgctgggataacaggtgtgagctaccatgcctgggcttatatgtttctagtccaaacatttagctaccttttttttttttttgagacgaagtctcactctgttgcccaagctggagcacagtggcacaatcgtggctcgctgcagcctcaacctcctcaggctcaggtgattctcccacctcggcctccctagtagctgggactacaggtacgcaccactacaccctgctaatttttttgtttttgtattttttgtacagatggggtttcttcatgttacccangctggtcttgaactcctgggctcaagcaatctgcctacttcagcctcccaaagtgctaggattacaagcataagccaccatacccggcctacctacttttaacttgtggaattttctataaggtcanggatgcctgngggaacaaaagtttctcccttggtatatgcaagtaaaatccacatgctgcctcccaggactgtagctgttgtctagtcaccaggctggactgcttggcatgatctcagctcactacaacctccacctcctgggttcaagggattctcctgcttcagccttccaagtagctgggattacaggcatgcactaccatgcccggctaattttgtattcttagtagagacggggtttcgccatgttggccaggctgctctcaaactcctgccctcaagtgatctgcctgcctcggcctcccaaagtgctgggattacaggcgtgagcccccggcccacatgtaaaagtttatatctctgttgtttcaccttgtttttgacctagtctttcagtgatttgaatcttgattcagtcttttgttattttagtggtacttcccagctttgtgtcatctgtggatgacatatgagtcttgcttcttcatgccaatttaagaagactgaacgggaataggtcaaaggcatggccatgagcgatttctctccagcttttcatggtgttcagcttcaaatctattcacatattggacctgcaagccatcatcttatccacaggctatcatcataggtgaatgtaaattgggtttaggtggccaagctgaacgtgagatatnttcagcatgttctctaaaggcctatcaaagctgacatcaaagggataagttccagttacccagctgaagggaaggagggtgtttcagatagaggaaggataagcatgacctattcaaggccagtgaaagaagcgtgcaacggccaagtcaggagaacctgaaattgtgtcaaagagcttggatgcaaagagccgtgggagactattgggggttttaagcagggatataatattcattcaagcatgcagtaaaaggtcactggcacctgccatgggccaggactcgggctctacatgattgcgtctgttttggaaatatcaccctggctgtgagatgaagaacaggtaggagggtcacaaaacttgaagcagagagactgttgaggaagtaagctgtttttgtgtggactgtggcaatcacagaggcagaggatataaatgcacagagacacaaggcatgtgggaggcagaaggaatcaaatacaatgagtgatcagatgtggggttagaatggtgagtganaaagacatactcaaggtgacacgcccaggtatctgggtggatggtaagacattcatggactagaatcgaagaggaggtggggatggacattccttccgtttagaggggttcaccaggaggatttgccggaacatggagaggattaaccaggaatccggtgcctttttccaaactgggttggaggggggtgaatgctttggcacgctgtgtagattttaggtgacgggtggtgacaatgagtccgtgtcgagcgctgattttttcggcctttagagcgagatttatacaatagaatttggcatgagattggattgcttttagtcagcctcttatagcctaaagtctttgagtgactagatgacatatcatgtaagttgctgataggtttccagttttccgctcctaggtctgcatattgtacttttcctcttactcgacttaaccagtaccaacccagcttctcaacggatttataccatggcactttaaagccagcatcactgacaatgagcggtgtggtgttactcggtagaatgctcgcaaggtcggctaaaattggtcatgagctttctttgaacattgctctgaaaacgggaacgctttctcataaagagtaacagaacgaccgtgtagtgcgaatgaagctcgccataccataagtcgtttttgctcccgaatatcagaccagtcaacaagtgtcaatgggctcgtattgcccgaacagattaagctagcatgccaacgggataaacgagtcgctcttggtggagggggggtggggcgcctggtgtttctaaagaggatctcctgccagaaatggtgtgctgacactgttgtcctccttggtgtggaactttggtgggaagaaaggttggaaagggaaattttgatccttggatttaacccgagtttgttactgatgctcacaagactaggggaaggataaaggcaggtgagtcactctaggatggctcantgagctccacagagctggaaccacaggcaccaggagggattcagagcaggcctcagtgcacgtcagctgagtgaaccaatgagcaggtgatgggtccaggcagagccctgtcctctttaggcaaaaacccttgaaacaccgttcccatcctagcctgtgttccacccaaagctggccagtctccaggccctgcctgagccccaaggaagtggtatggtgaaacagaagggccattcctgtccaatgtgtgaggaacttcatttcagacttgttggaagccctgatgttcaaaaacctcaatgatatcattcattttccccatccattcaatgcccatccaatgcccatccgttcaatgccccttccattcctcttcagggaaatgaaaattgttcagaaatcctttctctttcgagaaaccaaccaaaccaaaaccgcgaaattcactaaactagccaagacacaatcctgggttattttccttttcccaaacctcctctgtttaaattaattctaccctggttctcggcccttactgcgaaggtgaactcacctaacctctcccaaacagagaagaaacttctcttggtaaaatgggttttaacacttctaaaaaacccccgctatggttctaaaggtaatggactatggcgtacacaacgtctcgctcatcgtctgccaggaggctaaggtatccacggacaatcgctgagcaacagtgtcgttgatccatctctgtacgcacttgtcaacatggcaggagtacgggagctgcgagaatcctctctgctgatgtcccacggagcatgccgtgagacaacgccacgaacggccctcggagananctactctgcaatgaagacgtacgatacacacgtaggagtcctagctcaccagccgtatctaggtatactgtactcgcggatactcactcgtgcatgcggcaatagatcgatacgcagtcgtcacgcccatgctctcagtgtgtgaccttctggcggtagcgtngtgggcgctattactgtgcgcagcaggcgcntcgtacatgtgtcgggtagcgatgccaggagctgtaacatagcaagtcgcccccctactcctatcactatccctacgctggaccgcactcgagatctgaacgcacgtcttaacctgccagtactcgtgagacctatactgcgcaagccttggctaggagatcctgcagcgccggcaaagaatcagctatgatccccttgcgattatcgcacacgcaccatagagtatgtgcatattaacctctgaatgtgctgcaagcagacggttgctcaacatatatatggatgtggggaaatcgccctggtcaccgccacttggcgtcaggaggcaccagcacgtctgagtgtcacgcacgttactcggccgaatggtgaattcatccgtcgtctcgagggggtgaaagacggggagttatgctgtaatggcaccgctcaccctgggcttatgagcagacctaaccctcccanagtgctgggattacaggcatgagccaccgtgcccggcccagtatctgaacttctgtggccaggcagaaaaggtcctgtgttactcgtctcctttatcattcatgtccatattctcccatttgctaacatttatgtttctgctccactggattctttggatttttctagaacatacccatgctttgcattgccttggtctttgaatatttggtccacttttcctgcaaagtcccctctcaccttatcttcctggtaaacttccagccaacacctctttactaaccagagaaacatggttcaactgtgcacaggcttgcacagaaactgttctcatattgtcttgtcattgtcaatgtggcagagatgcaccttagatacctctttgagaaaggactcactgcccagctgcctggcacgtgatgagctgatagctccagctatagactcctttagggtcaacctctgctttccagttgagatcatatcctttgcagggtggcctccccagtgatgactaaggcagtgttacaatggcctagtcatttcctcccaatgctggactcccaatgaaccatctgctccggagcttcccactgggcagtcagagaccttagctagtctgcctccgaatcagaaggctctctcttgccactctggccgctgtgtctaaagattcacggctgtagttccaactcccgccgccctctactgtgtcctcttaatggcagtcattcaccatcttcctgtccctccccttcatttcttggatggtgactgtcactttgctgcaacagaaccctgtcccaatccttgatggttcaatacacacatagacattctttttaacagggcggcctctcaggtctttaattttcttccctccaataaccttgtgatgatcccccagcttagccacttactgccagatcattaccagtaactccagcccctccttaattctagtttctaatatcctaatctgtgacctcacattccaacttcttcattcttatcccctgagtcaaaaaatcctttgatccatgcaatccattaagtcatctaccttttcaccattcttcgccccactagggttctcattcctttattacccatatgaaattccaaggcctgttggaatcactcccttgcagccactgtcaatacttctgccccttttacttcatcacccttatgtggcaaaaccacagccctggtggagtcgatccttacccctgctctgtgccaacagccgcacacgcatggctgatggaggttggaaaaatccacacatgcagtgggccctgtatgtccatatacgtatccaacctccagccttgcatatgcctcagtgctgcctgacaacacattatatgttttccttagttccttcagtctcctgggtgcctaggtgagtatctcagacatccttctctctctgcaaagctccaacacctccacgtcacattcaactgatgactgtgtctcctatgtcacttagatcacagaggcatacataaacaaatcccagccactgccagcactctgcacatctgcgagcatggcacccccaatctaggcctttcctgctgtcacttggggtgagctgattatactcgatcctagtcatttctacttatgcaccttaaggcctccctctaacattttaatttaagattgaaaaagcaaagattattctgttttggctgcgcctatagtaaagtaacccctatgncaaattttgacaccttatagtatttgacagggataagtataaaattgcttgattgatacatccacacccaaatgtatgctgggaatgattttgtttcacggcactcattacttaatttttaaaactcttatttaaatttgcaatgttttaaatgaccatcacttaaagtagtaatcaacagaggttaggagaacataacaatactctttctcttagaaaatacaacagaaatataattttttacagttttgctcccaaacttttctctgtaataacatgccttactcacctttacaataggtttgttgtgagaatcttgtaatgtaaaccctgggtgttctgtgaagcatttttaaacttctagtttacactgactcttattcaagtgtttttaaaaatatatttaaaaaactggccaggtgcagtggctcacacctgtaatcccagcactttgggaggccaaggcgggcagatcacaaggtcaggagtttgagaccagcctagccaacatagtaaaacctcgtctctactaaaaatacaaaaattagctgggcgtggtggcgggcgcctgtagtcccagctactcaggaggctgaggcagaagaatcgcttgaacccgggaggcagaggttgtggtgaaccaagtttgcgccaatgcactgccagcctctgcagngacagccgggggcgggccgagtgatcctaaagcccgctcgcttcacaacaaagcctaacagtccaatcacttaatgctgcatttattcctggggaagcaagtctcctttgcactttacacagtgagataatcagtttctcatgtggaccactgggccaggagggcctgacaaagggcagtctacatttcagactggaaactgctcccagaactatttctttctagttcccacctcggtctgaggtgcctgaggagagggactcaacagaggaagcaggagcatagctcaaagtctcagaacatggaagaggaaaagaatcctcacaagattacgtaacttacaggcgtgttgctgcttcagtagaagtttcatctccctcaatcctgtacacttttccatacattacatactcaaactggtcagccctatggagcaatagcagcaaagttattcttaacagtaattaacaatataaaagatcccatttaaaaatggttactggtcagccgggcgtggtnnntcnancctntaaccccancactttggaaagcatgcgggcgatcccaagtctgatatcgaaacatctgcctaacatgtgcaacccctctctacaaaatacaaaaaatatccgggcttgtgttggcgccgttatctcactacccggagctaagtaagaaatgctttacctggaagcgatttttttacttatatcccctctcttcaccgggcgcgaccaaattctttagtataggaaagtttattgttttatgcctttgtcaaggctctactgtatcttttctgtccactcacggttctgaacaacagcaggcgattcctagccctgtacccggggcattgtccaacactcgacagggctgaattcgtccataacggtgtgcccctctgggatataggatgaaatgaattgatctgagtacctgggatgtaaagttactaaaacgccagctaggttcacgccccgatgcttaaatatgatcgtggcctacacctcgtccagcagaaaaagtaccctttcttcaacaccacctcacgatcctccaatttaggagctataaaactcatgactctttatttaccccctgcagattctcaatccaatagtgtgtgtctccctgtgaactcacggatataccgattttccccacgtcatttccacacgtcgcaatcgcttagtcatccctatgtatgagaatcatggatgactatgttgaagtccatctataaagttcaacccccatctccgtccctgattccccctccccaagatcaccaacgcgactcgacatattgttatcgcccaagggacctcttgcatcccccatatccactggtcacctcccctcttggctggaagtcaccgggaagttctccacatgttgttgcgagcgatgttcctaaactttagcgccattgactcgagcatggtcatggctgtttcctgagggtgttcctaaaggatactacgttccctaaagtccagagaaaaaaaaaaaagtaacataatgtggcttatttggtataaaaattttacaggaagcattgtcaaatatgaaatagtgtttggttttgtttgggctgtatttgtataaatatgttattggtatgtgttccaaaattataggaaactcctataattctgatatgacttggtgtacattatcagtaataattataattgttatggtaaattattgtgtgccatggaggtaacaaatttcctcatcaagtgtgtctttgactatggttgccctaaaactttttgccattcacagacaattgtcttgctttggtcctctttagaaggtggttttataatcagctataaaactctaacgggtgctcttgaatgcaggcttaagatagctttggagactgtgacatcagaatagaggaaaaactttcagtattcatggagtgctgaaatattcatgaatatcaagcaaaacaggaattaacttcatagatggaactaaaagaatgctgaagtaatctttttgactttttttcttaaaatgttgatccttcgttttgtttttcagagtcaaggaaatttttctgttgagatattgacagcttttaacaattaagtatactccagtgaacacaatttggagcatatttgtgtctctctatatatatttggaaacaatntttgagtattcttaacttattgcaatattggttgtctgctataccagtaatgggattgctgggtcaaatggtatttctggttccagatccttgaggaattgccacactgtcttccacaatggttgaactaactgacactcccaccaacagtgtaaaagcattcctatttctccacatcctctccagcatctgttgtttcctgactttttaataatcgccattctaactggcatgagatggtatctcattgtggtttcaatttgcatttctctaatgaccagtgatgatgagctttttttcatgtttgttggccacataaatgtcttcttctgagatgtgtctgttcatatcttttgcccactttttgatgggtttttttttcttgcaaatttgtttaaattccttgtagattctggatattagccctttgtcagatggatagattgaaaaaattttctcctattctgtaggttgcctgttcactctgacaatagtttcttttgctgtgcagaagcttttcagtttaattagatcccatttgtcaattggcttttgttgcaattgcttttggtgttctaatcatgaagtctttgctcatgcctatgtcctgaatggtattgcctaggttttcttctatggtttttatggttttaggtcttatgtttaaatccttcttttttttttttttttttttttgagatggagtcttagtctgttgcccaggctggagagcgagtggcgtgtctntaggacgcgcatgttgtctaaaggtttgtcttcctccaaaattcatatgttaaaacctagccccaaatgtgataatatttggaggaaggctctttgggaggcagagccctcatgaatgggattagtagccttataaaagagacccctgagggctcccttgtcccctccaccgtgtaaggatgcaacaagaaagtatggtctatgatccaaaaagcagacccttgccaggtacccaatatgctggcacttgaacttcccagcctccagaactgtgagaaataaatttctatttttcataagccaccgagtctatggtattttgttataggagcacaaacagactgatgtgccacccaaccatgattatacgtgtaatttatggtttctctgctagtagggatgcaccatggggttaggaaccacgcttttcttatttcccacacagtccttagctctaagcatgttcctgaatcaaagatccccatcttttatgaatgaaggagtcagtgaatgaattaatgaaagaactgataaccctcaataattattccagccttttatacctactattaaacggttctctaaagactttcaagagctggattttatgctttaggtgaaggtgataaagtaaagtgctttcactgtggaggggggctaactgattggaagcccagcgaagacccttgggaacaacatgataaatggcatccagggtgtaaatatctgttagaacagaagacacgaaaatatataaacaatattcatttatcccattcacttgaggagtgtctggtaagaactgctgaaaaaacgccatcactaactagaaaaattgataccatcttccataatcctatggtacaagaagctatatgaatggggttcagtttcaaagacattaagaaaataatggaggaaaaaattcagacatctgggagcaactgtaaatcacttgaggttctgattgcagatccagtgaaggctcagaaagacagtacacaagacgaatcaagtcagacttcattgcagaaagagattagtactgaagagcagctaagacacctgcaagaggagaagctttgcaaaatctgtatggatagaaatattgctgtcgtttttattccttgtggacatccagtcactcgtaaacaatgtgctgaagtggttgacaaatgtctcaagtggtacgcagtcattactttcaagcaaaaaaattttatgtcttaatctaacgctatagtaggcatattatgttcgtattatcctgattgaatgtgtgatgtgaactgactttaagtaatcaggattgaattccattagcatttggtaccaagtaggaaaaaaaaatgtaaagccagtgcttagacacagccgctgtcttaagaactgggctaggagtgagcagtgagccaagatcgcaccattgcacttcagcctgggcaacaagagcaaaactccatctcaaaaaaatacatatatatatatgacccataaaaaggagataaatcaacacttcagaactgacccaaacttgcaaagatactataattaacagaaaaggacagtttactaagtactccgtatgttcaacaagtgaaagattaaacatattaagtagagatgtagaagatataagaagatccaaaatgaacttttagagttgaaaactacaatatttaagataaaaatacactaggtgggattaaaagtagattacacattgcataagataaaaaaaaatgagcctgaatacagcacagtataaactatcttaaacaaaaacacagagagaaaaaataactttagagacttagctcttatcctctatttgtttctaaacagaggataaggggcagaaaaaatgtttgaagaaatcatgatttttaaatttccaactgagataggaatagcactgggtagtcacaggaggctggaaagacccaaacagcagttaaaacaggaactaggcaaagaaaccaaaggataacagtaaacctaaactaagggagagaaaactgacaaaagctgacttaggataactgaccctgaatataagccgcaagtaaccaattaaatttgttttccaaaattgtattaacaatctatgaaatttttatcttgaccatagctataacttccagaagccttttataacctctataacctttattaaggagtaggttaatgcttcaagaaaaccttgttaatctgacacaggacccatatgctgatcttgcatcagtgtggcttggacatcaatgattatgattaatttatagagaaattgaacttattttatctctcaaaattggcccttacaatctcacacacccacctcttccactatagttcctgggccttgagttgaatagctttaatttctggctctgtgtttcaagaatgcagtttattttgattggcattttctaccagtcctgaagatgaacctttaattgctgtcagtatttaagatttagcaggacttgtccttttaagaaccaggagtcaagccctataactcaatgtcacaaggactttaaaagcacatacataaagatatatggatgtaataatcataatttttaaaaaattgtattaatctcagtgttttctaagcaaaccaaaacttaataataatggcatagaaattatttcaataaaacataaaatctgttaagccagttaccaaaaggcaaaagaaaagaccttctgcaatgcacagaatattatgttggaagaaaacatttcctttagacctttaagaaaacattgttagcatcaggacacaacaaacagaatctgagggtaaaaaacgtatatgagctgaagggagttgaaggagggcattactatttcccacccttttaaaggggagagaaaacctaaaacagcaagatgcaataaaagctgaactttgggttaaaaaaaaattcttaagtctcttataatttattaagagtgaatcaaccccgtaagaaaatttcattgttctaaccaattttttaatatataagtagttttttaacatcaacccaatctctagaaagaccattataatttccctttaattatagacaactttatcatataaaagtttttttaaataaatcctcttattgtgacttacacagactattcatgacatgcttggactttctggtttgtcgtgaacatccttttctttctttctttcttttttaaattttactttacgttctgggatacatgtgaagaacatggaggtttattacgtaggtgtacatgtgccatggtggtttgctgcacccattaacccgtcatctatattaggtatttttcctaatgttatccctccccttgccccccacctcctgacaggccctggtgtgggacatcccctccctgtgtccatgtgttctcaatgttcactcccacttatgattgagaactgcagtgtttggttttctgttcgctaaatataagctatgataaaacagttggccctctgtatcatgggtttcacaactgtggattcaactaactgtggatgaaaaatacttgggaaaaaaagaatggctgcatctgtactgcacaagtgcgtgcttttattctcgtcattattccctaagcaatacaatataacaactatttatatagcatttacgctgtattaggtattataagtaatctagagatgatttgaagtatacaggaggatgtgcttaggttacatgcaaatattatgccactttatataaggcccttgagcctcctcagattttggtatccatggcagtcctggagtcaattctcctgcaacatctccatttgttcagattctcttctatatcatgtttatatcagaaaatctacataagattttttaatgtgttcatataggttttgtgtatttttggttgttaatccctagatatatgcagtatttattgctattatgagtagtgtttctttaccatgtattctagttggttattgctgacagagaaatgttgctggtgtttctaagttaccttgtttctaacaaccttgctgaactcttattagttctcatagtttttaattaatctttcttagttctgataacataatctgcaaataatgacaattttatatctttctttccaatgcttatatctctcagtcctctttatcccaaagtattttccaggatctccactataacattaaatagtaataagaatttctgtcttgttactgatcttaaggagaataaatttaaatttcctctgtcaggttttatgcttgatatagatttgtgatatatagcctttcacaggttaaaaaaaaatgctttcctagtagtcctaattttttaaaaaaatcatcataaatagatgttgaacattatcaaatgctttttctgcatctatagagataatcatatggttttttactatttattaatgtaatgaattagaccaattttctaatgccaactctttcttgtatttgtagggtaaatcctatgggatcataaaatacttttaatacattgttagatttgaagagttaacgccttatttagaacgttttcagtcacatccataagtgaaatggcactatagtgtctattactattatatttttctggttctgaaaccaaaattatactcacctcatacagtaagttgggcaacttttgttctttttttctgaaacaatttgtgtatagaagaaattaactgttccttgaaagtttgataataatcatccagaaaattatccccatctagggcttttacaaaaaggagactctagaatgccatttcggtttccttgatgtgtattggcctctttcatttaggcttttggattttttagggcattttttcactataggctttttaccggcataaacttcaggttggatgttcggtcaaagtggtccggcgatgcgaaaacgagagggctcgaggactgggcagagaactatttgaaggtatctctcaggggaaaccaagcggaaggcggggagtaaaattgggagggagcgacggccttcaaagaaggggcttgcattagatcggcgagatccgggagggtctggtggggagaaatgactagaggacaaatctaatggagagacagacggagatagatatcgtgacagagagagggacagtgacagcgcacaacagtgcagggtccatgagtacaaggcccttaagtgtacaccccagccggagtcatggcaattcgattcctgtactgaccacccaggatttgggtagactgtacgagttaatgagcatggtccccaacaagactgcttcgacctcagatgcaaagcacacttcaggggtccccaagccactcatgttttttgaatgactgccataagttcaaaaattcccacaattctctcagattcaataactgggtataaccactcatagaactcaagaaaatgctatcattattattacaattttattataaaggatacaaatcagaaggactagccaaatgaggagacacatagagagaggactagtaaaaaacagagcttctgcgtcctaccttcaaggaatcaggatgcaccaccctcccagcacatcaagtgctcatcaaccaggaagttcctctgagctccaatgtccagagattttagggaggattcattacataggtatcattgattaaatcattggccatgtacttgaactcaatctccagtgtccctcttctccctagaggtctgaagggttggctaatatcatgtggctcaaagccccaactctaattacctttttggtcttttcagggactagaccccatcctgaagctatctacaggccctgccatgagttagctcattaacataacaaagacacttatattactcagaaaattccaacagttttagaagctccatgtcaggaacctgggacatagatcaaattctttttttttttttttttttggagacagggtcttgctgtgttgcccaggctagagtgcaacgacagatcacagctcaatgcagcttcaacttcccaggcttaagtgacctttccaccttaaccttccaagtatctgggaccacagaaaatggctaattatcctggctgatttttaaactttttttttttgtagggatgggatcgccctgtgttgccaaggttggtctcaaactcctgggttcaagcaatcattctgccctggcctctgtgatggttaatactgagtgtcaacttgattggattgaaggatacaaaataatatttttgggtgtgtctgtgaaggtttcgccaaaagacattactttgagtcagtggacggggaaatccccccttccccatgggacggggagacccccctccatccaggtaaaaaaatctaatcacctgcaatgtggcagaaataaaggagggaaaaaacggggacccctanatgggttattctccacctaattcttcccccaggccatgtatttcatttctacagaccctgagatgaatttgtcattgccacggggtcctgaagttcaaatactctatttggtatcctgcccctgtggttaactgtgatcatttcactcaccttgtttatgatgagaggtgccaccatctggcctcctccactctgcaatcctgttaattcctatcaaagctgaaaacctgctgcagcacccacaccatcacctccagcctagagagggaagctaccagtgagctctcctggatgccggtgtgcccctcgccaatacatttcttcttagtcccttggtcatcctgaggtgtgtgattaatggacagctatgtggattgcacataatagatgtactccagcatcttcatccctgattttcctttacagaaatcactcaaccttagcaacatgtgaaaatcacctaaggacattctttaaatccctctgtccacatggcaacacaaaccacttaaataagaatctccagggagtcactcaagcatcaatgttttttaaagctccaattttaaggatcattacattatgtcgaagaaattatagtatttcagccttactgactgtaaaccaccaccatatctaagcatccattagtcaacctagcagacaataaactaacattacctccaggtactcaaatcaattcattgcatcccaaatcccagatgggcccacccttattgacaaattcagcccaatcttggttgaacacatttagaatatatttccatgaacaatatccggttgacgagtttctttaactttttggagtttaagccatttcctttcacagtagccttgttaattccctgtcaatgctccatgggggtcatgaagagacctcttattaactgtgaagcaacttggctcaggtgcagacactcaaatgcttcacatgcagtgggaaaagagagtgattgtctactttaaaaagaactgagtctttattcagtcgattcttctaatctatgaacatagcatctctctcaaagcatttagtccttctttaatttctgtcattaattttttaaaattttcatcctaaagattctgtatatgttttgttgaatttatgcttaagcatttcactttcttggtaacaattataaatgattttgtgttttttattccactagttcattttcagtgtgtagaaaagcaatgaatttttgtgtgttgatctttgttccaacatcttgcaacattattgaactcatttattagttctaggaggttttttcatttttcttgtagataccttgagattttctatatagacagtcatgttgtctgcaaacaggcacagttttatttcttccttttcaatctatatgcctttttttttttttttgccttattgcagtggctagaacttctagcactatgtcaaatagcattggtgaaagcagacatccttgttccttgtcttagaggaacatttggtctttaatcttgatttaaaaaattccttgcactaagttaccgtgttttgcgggagggagaggtggggtgaggtggggatttcccctaatgtttacaagctgggattttctttttcctgtgtctaattattttcctcattggcttgaaaaatctgataaaacattttaggactgtgtataaaatagaattagccaagtgcaatgtctttattcagaagaaatttcatggacgttgtgcctactctcttggcttcctggcttcatggctttccagatcccacagtaagctctggatagtagaagttatagtaagactgacttctaaataaatgaagtgactttaaccttactgatatggcttaaagaaaaggagtggcctttaagatccatgaacttctcaaacaaaagtgataacgttatctccatgcatatataatactaaatataatgcaactgagagaagtaggctgtggtaagaaaggagacccaagtgccatctgaaggcagcacttaccactctgcttcatcccaccgaggaaacaaagcatgagtattgccagattttcttctgtttcaagaaaagccagaaatccaggtttttgcgtgaaatgtcctgattttaatgttgggaactaatttatattttgaaataacattgtgtgggacaagtgaacttgtatgtggaactgctttctcccagtggcgaccagtttggaccgttgatactcagcaagttcagccaagtgcgccttgtcattgtcagtcatcaaggtgatgtgtgattggtcaagcaattaattttgctcagcatctcgtgtgttttcaaaagaactgaaggttcatttgctttcagagcacaatgcgtattcatagtatattgacttaatttctaagtgtaagtgaattaatcatctgaattttttattttcagataggcttaacaaatagaacattctgtatataaatgtgtaaattagagttaatctttccaatcacataattcgttttatgtgaaaaaggaatgaactgttccatgctggtggaaagatagagattatttttagaggtttgtcgttgtgttttgggattctgttttcttttaaaattgtaaatatgtacttgtgtgaatgattttttaaaatgattttaccatttttggaagggtatttaatgatagaatatcatcgagccaacatgcactgacatagaaagatgtcaaagatatattaagtgtaaaatgcaagagggaaaacactatgtacagtctgagccaaatcaaagcatgtatgttttttatatgtgtacaacaaaaggtttggaaagatatgcgccgaattgttaaatgtggtttcacttgagggggtgggaggatggggccccagaggggtttttatgggggcctttcacttggtatttttttcattttgttctgtttgaaattttgttttttctttttaaatggagtttcactcttgtcgcctaggctgcaatgtagtggcgtgaactcagctcactgcaacctccgcctcccaggttcaagtgattctcctgcctcagcctcccatgcctcctgtgtagctgggattacaggcacccatcaccatgcctggctaatttttgtattttcagtagagatggggtttcaccatgttggccaggctggtctgtaattcctgacctcaagtgatccacccaccttggcctcccaaagtgctgggatttcaggtgtgagccaccacgcccagccctgtttaaattttttataagtatgtactacttttgtaatcagaattattagaaagcattttactgatttaaaagcttagacatgttcaaatgcctgcaaaactacttaacactcagctttagtttttctaatccaaaaaggccgggcagttaatctttttggtgccaatgtgaaatttaaacggttttatgtttttcctgtgttgtgaatgaaaaatatttctgagtggtggttttttgacaggtagaccatgtcttgtcttgtttcaaaataagtatttctgattttgtaaaatgaaatatacaatatgtcacagatcttccaattaagtagtaagggtttatccttaatccttgctaatttaagcttgcataagtcactttactaaaagatctttgttaagctagtattttaaacatctgtcagcttatgtaggtaaaagtagaagcatgtttgtacactgttgtagttatagtgacagctttccatgttgaggttctcatatcaccttgtatcttgaagtttcatgtgagtttttaccattaggatgattaagatgtatataggacaaaatattaagtctttcctttacctaagtttgctttcttgactagtaatagtagtagatatttctgtaataaatgttctctcaagatccttaaaatctcttggaaattataaaattattggaaagacaagaacagtttttattcattatatgcattattatcgctttctcaagaaaagggaactggagcaattaaacatatgtaatttttttttaaaaaaccctaaacctaaacatctacctatatacaaaaattaattaacaatggatcatggactccaatgtaaaacatgaaactctaaacttctagaaaaaaaactggagaaaacctttggtacctatgacaaggcacagtttttagacttaacactagaagtgtgaactatacaagaaaaaattaataatttgaaccttatgaaaatcaaattatttgctctccaaaagaccctgttaagaggatgaaaactaaattacagattgagagaaaatatttgtaaatcacatatttgacaatggacttgtatctaaaatatctaaagaactctcaaaactcaacattaaaaaaaatatctaattagaaaatgagtgaacattttacgaaaggggccttatagattagcaaataaaacacttgaaaagatactcagcatcactagccattagaaaaatgcatattaaaaccacaataatgtatcgctacacacatataagaatggtttatgaaaaaatagtgatgacaccaactgttagtgaagatgtggagaaacactcatacattgctggtagaaatgtaaaatggcatagccactgtggaaaattatttggcagttccttttaaaactaaaaatcaatctaccacacaacccagcaatttcattacagggcatatatcccagagaaatgaagatttatgatcacacaaaaatctgtacacaaatgttttatggtcactttattcataatagccaaaacctggaaactatccaaatgtccttcaatgggcaaaggattaaacacactgtgatacatccataccatggaatactactcagcaataataaggaaagaattactgctacacacaagttggattaaactcaaggaaattgtgctgagtgaaaaattaacaagccaatctcaaaggacacatacttcatgattccatttgtataacattaattaacacaattaattacagagatggagaacagaatagtggttgccagggattatacatggtggacgcggtgaggcgggcctccacgccttggagatgaagggggctacaccctttaaagcacacccacgagagagttttgtgcggaggggcccaatttaagtactccgccccggggggggaacacaggggcaaacaaaaaaaattggccttgggggtgaccaaacacacaaaaaaaaaacaaacacacaaaaaaacaacnatgggtgggaggattaatcgccaaatctgagtaagctatctggacagtaccaatatcgatttcccagttttgatgttgtactataataatgcaagatgttaacattggaagaagctggctgaagggggctcaggaactctctggacatttctttgtaccttcctgtgaatccatcattattacaaaataggacattttctaaaggttaaatcattttaattttaaaatgtccctgttactgttgaaactcacatctccatatactgatcaagaacagcactaatggcccctggcctccaggaattcacaattcctactgacttttctttgaaaccttggccaagtcgcttctcttctctggtcctcaatttttcatcttcaaaatgaagattgaatgactattaaaatctcttgcaattcttgagatgaagggtcctaaaggaactgaagaggatgccatgtaatgtaaatatgggtttttactccatcagccagccaagacagagggcagacaccaagacatggtaaccaaggaggccatgtgtaaacaaagaccatttagacttatgctctggcctttgcagcccaactggtgtggccagttggtggggtatgaagaaaatggggccttccaggaaccatgttgagtggagataagcagggaggaatgcagaagacatgggggcagtgccagtctcagcccgagccagctacacccacacatggttatgaaagactgacagcctgtaagntgaacacagccctgcctctcttagataggcgcaaatatgatctcagatgtggatttactgtaaagttcatcaaatttaaatttcagaacacttaatctgcaagagtcctttccaagaccctatacctaattttgtgtttacaattttatatttgttttcttaaagaagaccaccaatataaactatatccagccttcatgataagtacataggaaactatgcaaataagggggaaaaaaaacaaagaaaaatacctagtttactaatggttcacttctgaatagcacatattcataatgatacaagcactcattactagtctaggaaaatgaagatataattgcattaggaagatcaagaggtaggaaatgtggatgtgtgtggtatagactagggcaggacaaagaacctaaatcctcattttctaaagataattgttaatacgtaaaactcaaaattcaagaagtaacagtaaaagcggtcattaagaaacaagcactaaacaccagataggaagcgagagatgggggaagagggcgacaatctgattattttttgcaacaaattttgtaaaaccatttgactgtttacatgtagaacttggatcttttttaaaaaacacaaaataataatactattattttttaactggatttttgaaaaagaagataaaagtctcattttagtaattaaaactcattccaggttagtccactcaaaacttatattcgaaaattaaaactttgggaggctgaggcaggcagatcacctgaggttgggagttcgagaccagcctgaccaacacggagaaaccccgtctctactaaaaatacaaaattagctgggcgttgtgcatgcctgtaatcccagctactcgggaggctgaggcaggagaattgcttgaacccgggaggcagaggttgcagtgagccgagatcacaccattgcactccagcctgggcaacaagagtgaaactccatctcaaaaaaaaaaaaaaaaaaaaattaaaacctctggaagttgagtttgcaaatattcattatgctcatttttaacttgtatgtttggaaaatgtcatgatgaaaattgaggttgggggatgagaaaaaaagaaaaacatcaaccccacagcccattcaattttcagcccgacccacagctccggggaagggcagcaggtccatccttcactctttcttcacctctttcccctccttctggctcttccacctctaatttggagcccaaaaaaaggcactgggaaatggaaaagtcttttgtacgtggtacttgccggggaagctgccatgaaaacctggccccacggtggggagggaatgcccanctgaggcctcgtgcccatgctaggatagactcgtccaaacatgtcaggtggtctgacagggcaagcancangaaatcatgtatgagtatgaactgatctgtatgcaagggcggggagaacacgcggaggaatggggcgtgagaaaacagcacagtacgtttctttagcagctgtctctgctcagccatgggaggtcacagagaaagaggcttggaggcgttattttcactgtgagatgtgagtgtaaaaaagtgcccaagacacagtgagtaccagggagatgccctctttcctacccgaatgcagaatggccacaggccttaaaacacacacatgggtcctcagaggagagaggcctccacagtggacacccgcattctcccctggtcagcagcagcagggcgagtgctgggccatcatgaagcttcacaggcaatgagctctcagcaataacaggaacagtgcctgggggactgtagctgcaagaccgattttcatgtaagatggcctctgaggactccgagatacaccaggctgagactagctggcagctccaagttgttggtcagaagagaacaggaactagggaaattggaattactgttactacaattcctttacatccgcacaaccatgaggtccagcgattttctattatttttttttttaagacagggtctcagtatgtcgcccagcatagagtgcattgatgtgatcatggttcagtacagtattcacgtcccaggctcaagtgaccctcctgcctcagcctctcaagtggctgggacagcagttgcatgctaccaggccaggctttttttttttttttttttagtttctgtagagcacatagcggttaacaatggcacagggaaacaaacagttccaggtgcaggggctctaaatctatcataagatgttaggtatgggggctctgccggacacaaactcaaggctttatgctgttatctcttgagcgaaatcctgggaacttcgtacattgcttgcttcagtaccttatcagttaatcggactctttgatatgttgggagtcagcgtacacaagttaactccttgaggaagggggtgggtaaggagtccttgatgtctggtaaatgaaggagcgaaatcgagttcctctggctttctcagctaagggagagcttattcatgtggaaacaaggctaagtgattaagggagaaagggagagtctgaaaacaaggttaggtattacaatgtcaataaaattggtctccttatacagtcctatggtagatttctttccatctttaatctccctctagcaccaccagactttttctctctgtaccttgagatgtaaattttgctatctgaattttcgtctaagagttgtttcctttaatatgcaaatttagggttatttagctgacaactgccaaagtagtgaaacaagttatcaagaacttgaacgtctaaggtaggaaaaaaaaaagtctttatgaatctataagatgtacttctattggcatgcctaatacgtctatgtatttacgtgttgtgtacacagtttttcactactgaaaatatatagaggagttctaattaattgacttaagacaataaaagcgcttgaatcaaataccttatcaggaaaaaggaaaagacaagtcaaatgcttgttcaagtttatataacttaagtaaaatctttaataaataagctagctttaacattatttgaaatgtcttaagaattgccagcaggttctgggttacagaactagtgggggtgcagtggggtgagggttggtggggtggggggtggtacgggggctttgttttttcttgctgcccccttctgggttggggaagtggcaggaccttggcagcaccccgagccggcatggcgttaataatggagggatgccagacccaagtggctaaggcccggctgcagagccaagttggcatttccagactggggctcgggccgcaccctctccaggaccctccccttgtaccgagcagattgtcgcgggcagtttgggccagctgtcctggcgtggaatttcccaaattcaacaaatcctccaagaaatcaatccatccattcatccatccatccatccatccatccatccatccatccatccgtggcagattatgaagcatggatcattacttttgggatgtggatatattcagttaacaaggagcagctttcaagagctggattttatgctttgggtgaagtttagaaacactagctcccacacctcatgtgctctagcgcctcttacctcatgccctccactctcagtcttgcactcaccctgccacactcaagggcttccccaggttccttcttagattccaccgatagctcagggactttgcacatgctacggtctctgcctggctcctccccagatcttctcatgcctagctgcttctcatcagcacccctcagagactgtccctgccccacctctccaggttccatacctgccaccctcccccaatcacgtaacagtttcttcacagagcgagttaccatcccagtatttccctaacttattttttgtgactggtctgttgcctgtctccaccacaagaacataagctgcatgtgaacaggagccttgtctatcttgtcaccccagtggctgtgacataacctgatacacattagatgctcaatgatgtttgatgaatgaagtgctggtagtccaactgtgtttccttgtctgtgtaagtatgtctgttgtggtttcctaagaacctacagctctcccactgtgactcctgttctatggtcctgatttgctggactagaatcctaacctacatgcttactcttagtgtcctcccccagaggctgaatcccagtccctaaacctccaccaaatggctaagacctagcttccaaccagacaggcctacgctgagacctcagcaccgcccttctgcggtctcatccttaacgcatccttcagggcccagcttaaatgtctcttctccaaggaaggctatcctctttctgcccctcagtgctctccatgcctcctctatgcctccatgcctgctttccaaccctgcagaggtggagaagttgctaatctgctgtgttgacatgtgctggggtgccttgggccagggagcaggctggtggtgtgctgatagcccgtggctgtgcccaggtccatgctcacttcctgagccccagtggagtaggctccctttcccttattgcagcactcagaggaaggacgtgcttcttaggacagatctggccaacctctccctcgtgagagaaggcccagccatcctcttgccctctttctttctcctgcccccgagtaataaaggtgcctggtcagagccttctagaaggagacccaaacatccaccacacattcccagttccaaccgtcatccacatggctggctgtgcaggtaaacgcagagtctgtttcacacacccaaccatctagtattggatgggaggacagtagcgtgacactcttctccagccttgagccctactgtgggccccacccaacccagataccagaggagccctgtactgggatgctattggatgcttgtccagtcatgtacaaagttagccctttgttatatagagttagctacgtacatcttcctctgtagggaacccaagaggggagaagagatatgtagtaggatttaacctgcaaatcctctgctgagcaccgtgcactacatacagtgggtagcatgtggtaggtgctcaataactattgaccgatctattgaatacacgtaagatcgtgacactatctaaaacgnggggtgtgggggaaaaaccccccccttgtttaggaaacccaaattggaccgtgttggcgcgcgattgtgctaaagatcatgcatgcctgatcaaacgtccccatatggcgtctcagagtcaactccttccccatcagtgccctgacttcggcataacaaacctggcaggttaagtgattaatcggtcctgtacaactgtagcccttagcaggaagcactaagcttcgttttcatttatttcttccctggaactgcaagaaatgagggatgccttccgccatgaagttttgctgattgtccactttgttctcaaggagatattcacagtttttaatttgtctttctctcctgcatggtctccaaacctgtccaaagaagccagctggctccatcatctgtaaaatcaccattgtcaccagagcacttgacttcctgttgccctacaatccacctgcactttatttcctgccaccatgataatgtagtgttactacattttacattcagctgtaagaaatgttacattcatttacttaaatcaaattaagtctgctcactcagtcccccacagtgaccaacttataaaagagaaggtacatttcagtcatcactgaggttctctctaccactggaaaactgaggaagggtctggagtccacagtggttaacatcattgcctctgttttttctcctactcaatgtaaccatccaaggttactcacaaattcacaaaaagaggtcttcacctctgctctcaagacccagagggctgggttctaaactcaaaggccaatgttccccaactttttgcattgtttcaacattggggaaaactcgaggggattcaagaatggttatataagttttgtggaaaaatgtataattttttaaaattaaaatacaaagtattatggaaagcactaaatattgaatttatataaatattccaaatatttttctaaatttttagtgagaaacttgagcttgcttctgtgagatatttattttaaaacagatttgacacttaaaatgtctaatcaagccttttaaaccatgatctatctcttcaaattcttcagatgccaccatcaataaagaaactttgttcacacaagtaagtggtagcaaatggcagggtgtttatcattttttttttttctttttttgagacggagtctcgctctgtcgcccaggctggagtgcagtggcgcgatctcagctcactgcaagttccacctgctgggttcacgcccttctcctgcctcagcctcccgagtagctgggactacaggcacctgccaccacgcccggctaattttttgtatttttagtagagacggggtttcaccgtgttagccaggatggtctcgatctcctgacctcgtgatccgcccgcctcggcctcccaaagtgctgggatgacaggcgtgagccaccgcgcccccgccgtgtttatcattttttgcctgatgaaattttccttgccactactctggatggtttgatacatttaaattgtgcttccagggtacaattatcctttaaatctatacctctttcctttcttttattgacaaatataatgttacacttttctgtcattgcagccacaccaccagtacacagatcccaacagagttgtaatattttattagtttcagagtttcaatattttatcactttcaatacttcatgtgcaggagttttatttggtacttctttacaaaataaatgatgtgcttccaagcatttcttttcaataattccaatcaatgttattaactgagtaatactagtatctgtttattcataaattcacaggaaatgcttttttacttattagtctttggaattctgttgtttgtataaacatctttcatgatggctttgtgtctaccaatagcactattgccaaaaggcacctttttcttgttcctttacttcactggtccgaagcctggtaccaacaactaccacacagactgggaaatgagcaattttgccacgtgcccttagctattaatggtggcactccataactagcatcttaagctcaatttcatgaaagaaatgtgtttcttattttgtacttgcaggcactttttaaacttgtaatcttttattcatactttaaaattaaaacagagtaatagaacccatagaaggaaatcaatacccacgagtccatactgatataaataaatagttacataaataaatggggggagaaataacagctcttccttacagaaaaatttcaattaataaatgaagaaggaattagggaaatacaacgttaccattaagcaaccacagtaataatcattacaggcaatatccaaaaataaattccaaagccagtgggcaaaagtttgaggagatacaggatattaacatagtctccaaatagctcatgctatttataaattacaaaaggaaacataacaactgtatagtgaagaaactcagcagacaccaccttagccaagtgatcaaggttaacgtcactagtaatagggcttgttgacatactggactccaatctgatacactgataaggacacatgacttctgcagtattcttaccaaaaacagaattctaatgtaattaaggaaaatgtcagacaaacctattctgagaaacattctataaaacaactaaccaatactttcaaaattgtcaaggtcataaagaccaggcgatggtcacagatttgaggagactaaggagatacaacaactaaatacacaaatggaaccatggcattcttgattggatcttgaaacagaaaaaggatattaggaagaaaagctgatgaaattctaatacattctgtagtttaattaatagtattgtaccaatattaatttcctagatttgatcattatactatggttaagtttttaacattagaggaatctgggagaatggtatatatgaactccactgttcattcaactttttcagtaactattatttcaaaataaagttgggagcggcggcccacgctgatctctaaagctttagaccacattggctcgagcatggtcatggccgtttcctggacgtcttagcgctatattataaagaaatattcacctccctgctgagcttacagggtgtacctaatgtccaacaatatgaaatctcttcaatgaattgcagcacgtccatatataacccacatggaagctgtcctctttcctcaccttcgaacttcccatgccaaagagggacctcttggactcaaatacatcttagcaatatagaagatgctggagacttgtaggagaagtggagagggtttacagtgtagccccacagaaaacaacttatgaccccatcagtcacttgtcccttttttccatgcctcagtctagtcaggaaaccactagatcctggatggcttcttctcccttcccctcctttctcttctcctctccctcccttgctcctccttcctccatcacccactccttacttccaaccaaaacttgactagctccagtctcatccctccttattgaaaactattttactcagccctcctcccccactcctgcccaatctttattccttacctacatcagacttcaccaaaacaaaggccaggataataaacaggacaaactctttcaaacacattttaatgaccatattttgttattttggtacaatttgaggagtcccaatccccagggaagactaacaagaagttctcctaacaaaggtgggtctccccttactaaaaactcctgtaatggctgaaaagagcatgaggttttctgcatatcattacacattcaatagaacgtcatgcagctgttaaaaatgatctgtagaaggctatcttgtgacagaaaggcattggagatatactgttagtgacaaaaataggttataaatgaatttttccatgcatgcctctatatttataaatacacacacataaaagacaggaaggacagacattaaacattcatagtgcttaagatgatgcatagtataatagttaggaccatggcctttgggacagaaaactacagcctctctcccacttatcagccatgggaccttgggcaatttgctcagcctcaaagcccctgttcctttatctgtgtgctggggttgttgtaagagttaagtgcaatacacagagagagagagagtacctaacatgtattatgtgctcagtcaatatgcatcatagtactcattgttacatatgttcctaagtgctttatacgttttttccctaagttgaccatctgtttttggcattatgaaacataatgatcctaacaaattaaaattaaaaacataaagaatatttgccccaaaaaaataaagaacatgaattcttcaagtagccaaggggccatagacagaagtaagcccttggtggggcttagttgagagaagtctccagaaggtctttcgtgtgttaaagaagagggtaacagggaggaggtggggagagatgttaactgagtctaaatgagcacctggaagaagagatgggacaggccacttctgcctggactccctgattgttaagaagaatgaaaaagagcagaagtcttccctgagcccaacttcactccctgacttaacctagtctttgccccttccctctcactcatggctactttctgtggtcaccttgttgtagaaatggatgtgcagccacctcatctttttctacctccttcacatgttttagataatttaatgtagtagaagacggttacagcaaaaaattacaaaaatcaaaatatctctgctatctactgttgcatttctaaccatcccaaaacagtagctgaaaacagcactcgtggtcgagcgcggtgactcatgcctttaattccagatactccggaggctgaggcaagagaatcacttgaacccggaaggtggaggttgcagtgactcaagatcatgccactgcactccagcctgggtgacacagtgagactccgtctcaaaaaaaaaaaaaaaaaaagcactcgtgtattttgttcaagatctgtggtttgggcagggcagggctcaatgaggacatctcgtctccgttcccgcagtgtcaggaagtgtaactgagactggagggtcacacagaagatggctccctcaagtggccagcaaattggtgcttacaattgacagggagctgttgaccaagggccccaattcctcttcctatggccccttctcgggctgcatgggcttctttacagaatggcagctggattccaagagcaagtatcacaacctacagaagagtggaggaatattgaaagttcacagtctcttaagacgttggcccagaaactggcaaaagcttcatttctgccatgttctattgatcagtcacagaacctgcaccaattcaagaggagaacatatagaggacatctctcaatgggataagtgtcaacaaatttgcatctatcacaatctgtcttttgggtacaaactatttctattcctccattatgcaaaatatactcacaacctcccaggggtcgcaaaagcctcatccatttatggcaaatgtggcccttttaatttatataaaataatttgcgggggcttcctttatatttttaactcccctgcgtgcagagaagtgatttaaagcccttcagaaagaatgctttattcccgtggaatttggtaacttgcttgggtgtggggaggtttgtcagctttctccactcaaattatcagaccctttccatttagtggtagaccatttccctcgtccaggccaagggcacatagtacagagaaatagggagttgttacccagggagagaacttggctctaaacctgtaatagaaaggtcagttctggtctggagggtcaattttgatctttggctcagatccaggaattggaaccaaggcttttgaacattttaatgcaggggattaaaaaaatgatacgagtcattcacgaatatatttgcttaacatctaaagagatccctcaaaacactagaaaaaataagaacaaaaatctaataaaacaaaatttgttaaacacatttaccaaatttttttttttggtaaaaattcaaatgtcataaataaagctaaagttcctcttgatgactcgctcctctgccctattccactccaagtaaccactattatcagtcttgccaatacccttccagacctctctacctctatataccattagaagcacatggttttgcattgaggatgtgcagtgttttgttttacgtaaatgttatcactctgttcttgttccataatttgcctttttctctcaatgatttgcttggctatctttctatttcagtagcatctcctttctttttaacttaccattgtttatttaaccttgcctctatcaacagatatgtaggttgtttctagttgatttcattaagtatttataaacaacgcatcagtagatgtccataaatttctttacggaagatggcaagtagtggaattgctgagccaaagaacatgtttaaaaaacccaaaaaaactagacgctaccaattttctctccaaaatggccatacccacttacccatacagagatgatttggaatctggcttcctcacaaggtgagatgccttcacagtttcattcttcctggcatgtcttcccttttgtatctgagagagctggcagaattgtgtcactaaatcaaggatagagggtcaaatgacagctcaagctcacaggcacctctgctttcttcccagaccacctgctttcctgccaccagctctgttccatcttatagaatggttgccacttgggtgtctgctccgacagccatgtcatcctttgcactgcagttatgaagcagacagagctaggagaggggctttgccagcctctgccctagcttggagaacttcaaaaaaggagggtattgaagttgaactcccccaaaaaggggtggtccccacacctcaaaaagtggtgcctccgaaagaaatgtaaaattcgtgtggggggggaaaaaggttatttagaaattgttggcttgtcgtgccgaaagtatgtgtggttacggggagtacggaaatttcgaggggtgggggcgaggccgtgtgtcctttagcccggggttttcccgtcgcatgtttaaggggggggaagaggggggatgttttctttccgcgaaggtttttgaagaacggcgtggccccccaccgccactactcaaccggccgttcacgaaacaactcgccacatccactaacccgctggctcaccacccaccgccctcccgatccccccaatccaaactcaacccccaccaccaagcgcctcccccctcccccaccctccagctcagccccaacctaccaccaaccccgactcgcccaccgaaaaccaacagcaaacccaaatgcccacaaaaccagtgtccaaaccctccttcccatcagtttggtgggcccatcaccgcttcccctggcccaggctctccttttgtgcgcttggagcagcagactgatctcccagccttcactcacttcatgtggtaatctgttgtgttcatcactgtcagaatcttctgcatcccctcactactctgctgaaaacactctagtggttcctcattgctcattaatgaaagtctagatattaaacgtagaaggcccagcacaatttgcccctatgccacctacctctctaatcttttctccttactctgacagactctccgtctgtcatttatgtattcttttattgctctcttctacttttagtatgaactggatttatggatttttttaacattgctttcaagtatggaataaagaattttatttatttatttatttatttatttgagactgggtctcactctgttgcccaggccagaatgcaatggtgcagtcatatctcactgtaacctcgaattcctaggctcaagccatcctcctgcctcagcctcctaagtagctatgactacgggtgtgcatcaccacatctggctaatggaataaaatattacaatgcctaatcttaattttcaaaattttaaattacattgtacctaatgcccatgcatttacttttttcagtgggtcaatagccctcactttggcaaaggtcccaggcccaaggtaaggccttactttttccaaactcatcttttgaaagacataagtgcctgtaagttgtaccacattaggttctaggaatttttcatcaaagactttatcagactattttcctctaagttgagaaagagctgggggcagaatatggcactgaatgactgaagagaaggcactgaaatcaggccagaggttgctggaaagagcaatgaggaacaccagcagcaatgaggagccggtgatgattttggcttcacagggaggtgtgtaccacaccgattttatctctacgtggatgaaccacagctgtcggctcccttgtctccaggacatcacactctccacattccctcccatcttccggcttctgcttcccggggccctcatctgccccatcctgggtgaacactggtcggtcaactgctgggcgtaccttcccgctctgcacaccctccctggccaccccacccactctcacggctcgcactgcagaggagccgcatctctagctccagcccatctgcctcttctgagctctaacttcatgtaggcgactcctgccggtgttgcctcacaggcccatcatacttcaaagcattttcccctcagaacaccatgtcctggctgctccctccagaagatacatctctcaagcacatccccgcggctctcacctggatgactgcattcaccttctcccacatttgccccctcctttggatgtatatagattgttttaaaatacaaatctgatgtgcttgctctcctgcttgaaacacctcaaaactgccttcaggataaaccactgcccttgacatgttcacaggttgcccatggcctggccctgcccatctcttcagcctcatctcatgccccttgcccctcgctctctgggcttctgcctccctagccctcctttaggttctctaacacaccatagtccttctagtgttggggcctctgcaagtgctgttcccattgcctgagacatgaatccctctccctatctctacctgcaccttcatctgattaatccctacccttcctactcatgatgttgctttctcagggactctctctgactttttaaactaatcagggtctccccagtatatatcttcatagcactctgtattactcctttcttaatgaccacctgctgtagacagaatgtttgtcttcctccaaaatcatatgtaaaaccttccaccagagcgatgattagagaagcctcccgactgacattcagaagatattaataagagcactaatgatggggattgcaaccatgtctttactgacttccagaagcttcttacagtaaacatgaaatcacataatttcttccactttcctactgtttcttgttctgggctctgtcctgcttactgtctaatatcttggccccttaaaagttgctaatcttccaaacctcattcctgtgactgggccgctggtccttgttcatgggccttgaagatactgactgtacacttatctggagcatccagtgcctaccacctgacccagattcctcattgcgctcctccctcctccacctaatgggatttgctcatacccgtgtgggacccctcccattttccccaactgaatacttatcaagacaacgcattgccatactccctcgtaccctgctctgggcatcagactgaatgtttgtttccattgaggatctgcagctgcatcagtttccccagcaccgtccaaccccttgagcatggctagtcctaaagcagagaattagcctttctatccctgctgctatacatgctgggacaaataataagaaatgacagcattttatgataatgcaggctgcaggaggcaggaggcaggaatcaaattcgtgcttatcaaatagtgctccaattctttgaatattggactatagaatatgtcatggatctatgctcaggtgggttccctattactcactccactgaggccaggttgtgggattagctgtccaagagggagtttcagtctcacagcatagggtcattctgagaattactggcccacacttgtgtggagacctccagagaacagaatctgggttggtgccatgtacttccaggaggagagaagtggcaggatgcccagccccacaatcagaggggaaggggcagagccacatgtatgaagatcctctccccagtacgtgccaatcacagggcttcctagcttttgggccaaggaaacaatgtgggaagcaaaaaaggacaattttctcctccctttgcatgaagactgagcagttttaccagattcccagggaaacacccttccactctgggttgaatgtgagtgagagacattcagctggaacactagaaaaactatttcctgagccactcacctttagccctagaaagtgttggatttgtccttcatctttgccacagtagagactgctgatagcatcagaacttgggctctggaattagacagatatgggtacaaatctgagctctctcacttattagtgtgggatgtagagcaacttttaaaatccttccaaacctcagacttctcatgcatgatgtgaggattgtaatagggcccacctaataggggtttttgagaattaaaaaagttattcaatgaacagcatttagcaagatgcctgaccattgagaaaataacaaattgtttattattattgttattattaaacatctttcctgcaccttctgactgggggcatcgtatcatcagaaatacttaggatgggatggattcctgcatgggctgagtcaagggtgcaataatggaggagtgaagaaggaagaaatggaggcagaaatccccaggagcccagcatggtacaaggctgagctagtgctgcagagcctccttggaacagccacagagcttgcatctggccctggaggaacctcttctagctggcaggaccagccacaacagtggccaggggatttcccagggcgtgggctcctcaggagttcatttggaccaagcctgcctggagaggggttataacagggatccttccctactggcaggtgatttacccctcggtgagaagctcaggcatttgtttgatggaaggtggaaggccctgtgctgggccagtgactatcagggatgggcgggtggctggaaaatagcaaataagacaatatgataacacagttaaccaccacactatgtgaagctacaatatgggtatctgtaatagacaattccaatgtagagaataattttaaggtgtcattctccccgccaatgccataagcacacggcctctgcctgggtttctcactgtggaatgtcctcctggtctcctcatgcccagagagtgggaagtactcctactttaacaccggctttcctgtcatttccntgcagccctcctcagccccctctgcacagggaggtttcctccctgctgctgcagtgctttgtacttgttagtggtacctgcacacaggtattggtgtccttgtctcaccaccctacatcactgtaagctccccaggagcaggcttcctgtttgactcacctgtgatcctccacctcccaccctgtagtgcctcaagcattctgtagagcacatggacgccgactaataagtacttcattatttgggtattttccaagaacaacatattgtaggaaaccattctttctaaaaaaaaaagtgtccttttaaaaaggtgaataatttttgtctaattcaaagtttattgaaaagttatgtataaaacaaggtaaaaggaacaaggaaataagggaaatgtaaagaaaattatagaaataaagtggtattttttggtaagaaagcttaaagagaaataattttaggtaagaaagaatcttacctaaaattttgtgctagaataaagtgactggctaagaaagggatgttcaaagctatttatgacaaacccacagccaatatcatactgaatgggcaaaagctggaaacattccctttgagaactggcacaagacaaggatgtcctctctcaccactcctattcaacatagtatcggaagttctggccagggcaatcaagcaagagaaagaaataaagggtattcaaataggaagagaggaagtcaaattttctccgtttgcagatgcatgattgcatatttagaaaaccccatcatttcagccccaaaactccttaagctgataagcaacttcagcaaagtctcaggatacaaaatcaatgtgcaaaaatcacaggcattcctatacaccaataatagactaacagagagccaaatcatgagtgaactcccattcacaattgctacaaagagaataaaatacctgggaatacaacttacaatggacatgaaagaccttttcagggtgaactgcaaaccactgctcaaggaaataagagaggaaacaaacaaatggaaaaacattccatgcttatggataggaagaatcaatatcgtgaaaatggccatactgcccaagtaatttatagattcaatgctatccccatcaagctaccattgactttcttcacagaattagaaaaaactaatagccaagacaatcctaagcaaaaagaacaaagctggaggcattgtgctacctgacttcaaactatactacaaggctgcagtaaccaaaacagcatggtactggtaccaaaacagatatatagaccaaaagaacagaacagaggcctcagatataacaccacacatctacaaccatctgatctttgacaaacctaacaaaaataagcaatggggaaaataattccctatttaataaatgatgttgggaaaactggttagccatatgctgaaaactgaaactggaccccttccttacaacttatacaaaaatcaactcaagatggattaaagatttaaacatggctgggcatggtggctcacgcctgtaatcccagcactttgggaggccgagatgggtggatcatgaggtcaggagatggagaccatcctgactaacacagtgaaaccctgtctctactaaaaaatacaaaaaattagctgggcatggtggtgggcgcctgtaatcccagctacttgggaagctaaggcaggagaatggtgtgaacccaggaagtggaggttgcagtgagccaagatcacgccactgcactctagcctgggcaacagagtgagactccatctcaataaataaataaatatggaactctcccaacacaataataagacaaacccccaaatgttttaaatgggcaaaaatatttgaacagacacttcacaaaagaggatatgtaaatggtcaaaaagcacatgaaaagatgttcaacaccattggtcatcagggcaaagaaaactagaaccacaatgagatgcctctgtacaccacttaaatgtccaaattaaagaaaacaagttttggcaaagttgtggagcaactgaaatgctcgtgtattgctggtagaaaaacaaaatggcataaccatcgcagataatttgttgtcagtttcttacaaagttaaacatatacttattgatatgacagttccattccaagagaaatgaaaacataagtccacacaaagacttgtacctgggtgttcatggtagctctattcataattgccaaaatctggaaacaaatcaaatgtccatcagcaatggaatggatatacaaattgtggtacacatgtacaatagaaaactactctgcaatggagagaaattaaccattgacaaacacaaaaacatggacaaacctcaaaaacattatgctgagcaaaagaagccagacacaaaagactgctcagcgcatgattccattcatatgaaatcacagaaagggtcagttgaaggtgcagagacaaaaagtagatctgcagttgcctggggatggggtgggaggttgactgctctgacgcgtaaggaaatttgggggtaggtgggggatggtgggaatattttttgaattgaattgggtaatagttttaataggtaaaatattggaccccacagtatttgagataggtttcagtcaatttagacagtttattttgccaaggttaaggatgcatccgtgacccagcctcaggaggtcctgacaacctgtgctgaaggcagtcaacatacagcttgcttttattcatcttagggagacataatacatcaatcaatgcatgtaaggtttacattggttcaatctggaaaggtgagggaacttgaagcagggagcttccaggttacaaggtagattattctcaacagaaaggaatgtctgggttatgataagcggttgtggagaccaaggttttatcttgtagatgaagcctccgggtagcaagcttcagagggaatagattgtcaaagtttcctatcagacataaggtctgtgttgatgttaatgctggtcagcttttcctgaattccaaaagggagaagggtatactggggcatgtccaaccttcccttccatcatgacctgaactagttttttcaggttaactttggaatgctcttggccaagaagaggggtccattcagatggttgggggggcttagaattttatttttggtttacagtgaagacttttcaagctagacacttaaatgagtatgttgcaaaatggcaatttcttagcacggcgacgtcctaaagaaatgctaaggtaactcaattaactatgctagaaaagagagttaagtatttaggaggatttaatatggtgttaaagttgtgaaaatcaaaatggagacactaatgttaagaaaaccctgataaatggagccagggaaggccatgaagaaagagttctcacacttgtatccctgatcatgaaaaagactctgcaaaaaacaaaaccttgcacaaaggccattgcaaccttacacaaaaaatactactttaaaaggacatgtgcccagcaactgcctgtccaacctcagactggcaatatctttgttattgatcttagtagcccagcataactatttcaaaacagtgatgtaatgctcattttttttcttttgaaaacttttgtcttcctgtaaaaacctttgtcttctttacttaccctgaatatgcacagagtttactatggagtgcatattcctgttgcaatgctctattcccaaacaaacatcattttcttttagagagcctctctctgtttgtgatttaggttggtgatgtaaagcaatggcataactgaacactgattcaaagaaaagtggcttttctctttgttgtattaaaaagaggccttataaataggatagtaagatttgtaagttgaacttaaagcatgaagaaaatttaggggccaggcagggtggctcacacctgtaatcccagcactttgggaggccaagacaggaggattgcttgagcccaggagttcaagaccagtctggtcaacacagacctcatctttactaaaaataaaaaaattaggccaggtgcagtggctcatgcctgtaatcccagcactttgggaggccaaggcgggaggatcacttgaggtcaggagttcgtgaccagcctggtcaacacgatgaaaccccatctctactaaaaatacaaaaaaattagctgggtgtggtggcgggcacctgcaatcccagctactcgggaggcttcaggcaggggaatcacttgaacctgggaggcggacattgcagtgagctgagatagtcccactgcactccagcctgggcgactcagcaagactctgcctcaaaaaaaaaaaaaaaaattagtcaggtgtggtagcacacagctgtggtcccagctactcgggaggctgaggtgggaggatcatctgagcccaggaggtcaaggctgcggtaagagctgagattgtactactgcattccagcaggggctacaaagtgagaccctgtctcaaaaaaagaaaaagaaaaagaaaattatgtttttaaatttataattataataaatttaattacataaatttaagctcaagtaattgtaaatattctttctgtgcacataagttattcttgtattgaccccacaggagctggccattcttcaagtcagaaggcctgagagaggagctgcccaggtggtcttcatggggctgtgcggccagtcatcccccacaggttgacaatccttgtgtacttcatcctcgttggatcctctgtatccctgacgatgagcaactgtgaggcccgtttcagcactgagttccagtcaggaaaacatccacccacccaccacacgctcacacttacacacacattcacacatgcacacacgttctggctccgaaaaagaaaaaaaaaaagcaatttaaaataattctgatcctttgcttatttccacaaactccatgaaaattgtacattgtccaagcaacatttcttaatattctctttttctctcatatccattttccttactgctgtctccacctttctcttccaaactccctgttaaaatccctgccccagcgaacttttattcaattttgtggaatggaggctgctctgatttaaattaaaaaaaaaaaaaaaatccctactccatgtcccagatccctagttgttttttgttttttgttttcctgagacagggtcttgtgtcttccatgctggagtgcagtggcatgatcatggctcactgcagcctcaacctcctgggctcaagtaaatctcttgcgtcagccctccccagtagctgggagttcaggtatgtgctaccatgcctagctaatttttttcttttattttgtagagacacggtcttgccaggttgcccaggctggtatagaacccctgggcttaagtgatcctcctgcctcggcttcccaaagtgctgggattacaagtgtgaggcactgcacccaggctggatccctgcatttttacagatttagcatcacaaaagtctaaacaattagactgactaaggcagaactgcccttatgacagcagacataagaaggaaaaggccaaaacactgtgttaaaaattatccaaatgtgaggaaaaggcaaagagagtaggtgtgcctttttagtgtctaagctgcctgcccaaggggcatctgatgctctcaggcaggagtccacaaatttttttttgtaaaagatcagatagtaaatcttttcagcgtgaagagcatgaggtctctgtcacaaatactcaaccaccattacaacatgaaagcagccaacagacaacacatgacaaatgagtgtggctgtgttccagtaaatcttgattacaaaaacaggcaagaggccagagctgacccatgggccatagtttgctgaccccttctgtaaaggaaagtatttttgtttgacttgctgtttaccattgattgaacacaaggctctgtagagttacttgttaacttgcagaagattgatgagtggcaagtaatttttattcaccagaatatannattattctgttcagtagataagataaacccactgttatattactgtcttgtttagaatgtgactttgattcattttttcacaaattcatattattgccctaatttgtatataagtatgcttcttttaaaaatatatattttttaataaatttgagacagggtctcactaggttgcccagccttttgctataatgagagcataaagtgaatttcacactttagcctagtgcatagatgggattacaggcacaaaccactgcatgcagctaactttgcttctcattccagcacgttctattccnnngnttttcatatacgcgtctcttaatgccgcattcagcccaagttttcttcagtgttaaggtttttgttactctgtgcccaaatgtccttccaaaaaggttaagtttttttaccttcctgccaacattatatgaaagtgtccacttttgtagacttttaccaatgctgactacttttggtttcaaaaaagctctcagtaattttctattaattacttttacccttttttattgagggtgttcaactttttattgttagcatattctctctgggctccattggacgccttggcagctttttggtagtaggtgcctttagaaaagtccttctcgtctggccctttctgagcaaatctagtgaacagaattggctccatgctcagcattgcttaatacggttgatccagggcctaggactcattccttcattaccatccacttgcattgtcttaaagcaaggctctattaatttaatttggcatttcctgtcccagctctttagtttcattaaacaaaggctttagaaaactcccagtagatgcctatgttgcttccttttaaaaaattttggagctgtttccctagcctaaccttttcttcagggcaggagttaagtcccttctactgcattcctgtgaagatggtgattcaagaggcagggcacctgttgctttgtgaaacagtccactctgcagctgggcagctctgttactagaatgttctcccttctggggagccaatattttgatgtcctctgtgaatctcatctgcttatcccatctgtttatgtccttgaagatgcacaggtctgacaccacgaggtagcccttagaaatttgatggcatttctgatgtgtccccaactcttctccaaccactcctcccagagcttgtttcttaagccccttgtggagctgattgctttcctcaaggcagctcagtttttcccagtttgctcctggtggtcctgaaatatgattgactcctgaatactccaggtgtgaaggagagtgggggtggcctttctacttgtcatggcctgggttttaagttgctgtccagtggagcagaggtgactttcccagtgaactacattttttcccctctaaatccttagcaattttgtctccagaggcaagacctggccaaaccatttgtgttgaggattgaatcaagaatgattgaggagatgacagtagtcccccctcatctgaggagggcgtgttccaagcccctcagtgaatgcctgaaactgtggatagtacccaactctatatgtctatgattttcctataaattaatacatgcctgtgacaatgtttaatttataaattaggcaaagaggccaggcgcagtggctcaagcctgtaatcccagcactttaggaggctgaggcctcacctgaggtcaggagttcgagaccagcctgaccaacatggagaaaccccgcctctactaaaaatacaaaattagctgggcatggtggcaggcgcctgtaatcccagctactcgggaggctgaggcaggagaatcacttgaacccgggaggcgggatttgcggtgagctgagatcgtctcattgcactacagcctgggcaacaagagtgaaactccgactcaaaaaaaaaaaaaaaaattaggcaaagaaagaaattaacaacaataagtaatgaaatagaacaattctaacaatatactataataaaagttgtatgaatgtggtctctttctcaaaattaccttttttttttgagacagggtctcactttattgcccaggctggagtgcagtggcacgatcacagcttactgctgcctcgacctcctgggaccaagtgatcctcccactttagcctcctgagtagctgggaccacaggcatgcaccactgtatctggataattttgtttatttttttttgcagagagaggaggtctcactatgtttcccaggctggttttgaatgcctgggcccaagggatcctcctgccttggcctcccaaagtattgggattacaagcgtgagccaccatgcctgccccaaaattatcttattgttctatacccactcttcttcttgtgatgatgtgaggtgatccattgcctccttgatgagatgaagtgaggtgactgatgtgggcatagtgatgcagtgtttaggctgatattggcctgatgatatgtcagaaggagggtcatctgcttcggtgatcctggatcatagagtcatgatgatgtcaatggttggatgtcaggagcagacgatgtcaatgactaacgataagctggacaggtgggatggtggcacaagattttatcacgctactcagaatggagcacaatttaaaacttctgaattgtttatttttggaatttttcattaatatttttggattgcagttgactgtgggtaactgaaactgtggaatgtgagactgtggaaaagtgagggagtactgtattatggaactgtaactctattcggtaggggaacagaattcacatttgtggggcccaggtctctgcatctgtagggatccaattgtttcatttctcgttgtagcaaaaacttggctttggaatcagacagattgatgtttgctatcattctaaatgggtgcagctacactttcctcaagaggtagttctgaaaatttaacaaaatgtgaatttcttggtaaaaaaaaaaaacctcaaaaatattcagtttcctttcctttgtgtctgatgtactccatcaaatactgggaaatatgtgtctctcatagaaatgtcatggatctttgtaattctgattatccacaaaccttggggattagctgtttcaatgttcctattttacagataagaaaatggagcctgtggtaagttaagtgagttactcatggctacttaactaatattttactaggtgataggccagagctagagcccaggtcaccttcttatcaatgctctgccttgtctctgtgccttcctgtctgtctgtatgtgtatgtgcctgttgacagtaaggcatagtttaacccagtagaactaccggtttgtaatgaattccacttgtaaatgactgaccattcaaggaacaagtgttttttctatgcttgacacctgttttggatgccaaaaaggatacaaatgtaacttcagacactctgggcctcattttgcactcattagcatgtccaaaattaaaaagactgaccacaccaaatattggtgaggatgtggaagaacgggaactttcatacactgctggtggggatgtaaaatggtacaatccctttgggtaacagtttgacagtttcttaaaaagttagacatatatatttaccatatgactcagcccttccacttctaggtctttacccaagagaaatgaaatgctgtgcttttacaaatgtctatacaggaatgtacatagcaaccttatttgtcattgcaaaaaacagagacaattcaacgttgtcaagagtgaatggatgagcaagctgtggtctgtctatgcaatggtatcctactcagccagacaaagatatggctaatgacaacaatgtcatgcataagatgacgatggcctgggtgattgatgcaaacaaggataaagaaaataatcaattttgtccccattttcaaagacagatagcagcagcaagagtgtaagtctgaggaaagtcatattccttcctcctacaacatagcacacacacttacaaaaacaatacacagactcctggccaatggacttcaaaactgaggaggatcattaaatttaaatgttcaccgctgcatgaaatctccctgggtcctgccctcccttccccaccctcctccacttgggccggggcacagcagtgattctctcacctctcagagtgagccagtgttggctgcattgaaggctccagatatgcaaacagggcagatattcctggaccagggtgcacagagtgaggctccaacgcaccctattaactgcatgaaggatgaatgagcctctggtatgggctgggacagaaaaaaggattcaaggggcccaaaagggtttgggtggaacctaccaggagcggcagtacagactccttgggaaggtggccatgatttagccacattcaccaataggataatctggagaatttcctagcttgagtttctgggagaaagcagatttctggattatctggtgacaggtaacagggccgagttcatccacagccacctgcagtgttagcaccttaagctgagttccttgcaccaggatgctgtcacgcccagtcagtgtgagacggttcttggctgaaggactgaaaagcttgggtaagtgacttcacctaagcctctatctcttgctcccgtaagtcagggctcattgtggctccttgcaggcttgacttcagggttaacagagaaaatgaaggtacaagtgccttgtgaactctgaaactccaaaccagtcattctcaaagtgccgtccaccagtctagcacatcagcatcactggaagcttgtttgaaatgtaaattatcaggtcctccagagctatgtatgaattagaaactctgggaatggggccctgcaatctatttcaacaggtcctccaggtgattctgatgcaagttaaagcctgagaaactctgtcctatacaaatggatgtcaactcaagctgctcttcagaatcacctatagcacttgttcacccgaatccctgagaatggagcttcaggactgctatttctcaaagtttgcctggtgatcctgagatggggtttgggggacagagatccaaggtgctaccaggtgtgaggaattgttagaaggcaaacctggctgtcatctagggtgcttaaagggtacagatcctaggattctgcctcttacagctgaatcagactttcctagaatgggattgctgtccaatggcatgcctcctgggtgactctgatgtatagcctgggctgggaaccaccagaggattatcttccattgaccaagctgacaaactcgcttaaggctctgagtttcacacttgattttctagcccctgtccttccatggatcacctgcccccttccctcctaatcaggagcacagtcagtggatgcactaatgtggcctctccttggctgcagggaacaggtggaaatgtggccataggtgtgcagggctgcctgccatgtattaatagctacagatttgaaagatccaaggacaagagactagaaaaaaatttaaaacagccaagcattggcccagtaatggcatttcagaaatccaccaaaatattaagatgctttttgaaaaatatccagagcactcatgtaaaagtgcttaattattaataaaagctgacatgtgttgggtacttcctgtgggtctggcactaggctaattatgtttttaggagttgactcaaatgctccctgtcataattatgtgaaaaaatataattattagctccatggtacaaattaaggagaggttacataaataaaaaggaatgatactcaaattagtaaccagagcccatgctcttaaacactatgctattatttgtggactcttacataggtggcaaaagtcaaaggctagattgacttctgtccacttccagccaagatgaagtacaagattcagatacacccttccgcattaaacaacttaggaatcagacaaaatatacaaagcattgtttgttacacattggataacagacagcactagatagtcgtgtctgagaaaagcggtgaaatgagctgagtcttagaattgccccagtttactaaggggcatagtaagggcatagctgcagcacaaagaagcagaacccaacagagactggcgttcacctgagttgagaaaaccaagttgaaaatttaggaacactaacacagatatgtaggcaagagtatcagagaggagacagttgtagggaaaaagagagctttacagagagacagcgagagctccagagacccgcagaagattgccctgacgtcactagctgagtaccgatcagtgcatacatgtaaggatattactcaatatgtggaaaagaacagaaggaatgatgtccaaagctcacccaaagacaggaatcatttatgtttccaccagccagagtggaacaaccttgtaacgcatatggagtactcaaacgaatatttcctcaataataagttcaaattaactgagactaaagcctgcccgctttgtctggacatgcctaacaaagctttgagggaagcctcaaaagaatgaaaccgtgtccaagtaatttaactgtgtcccagaaaaaaattcaagaacatttaaataaatattaaaatatgatcaaacccagcaaggttaaattcaaaatgtctggcatccattaaaaaattaccagccttgaaaattggcgggaaaatattattcataatgaaaagaaaaagcaatcaacagaaacaggcctagaaagtatacatatgataaaattagcagacattaaatggttatgattaatttattttatatgttaaagaaggtagagaagagcataagcacattaaagagagacaggaaagtcccagtactcacacagggccaggagcagttttcaccagtcaggtgggaaaacttcatatttcatggagcattggtagagtacacagtgtcttgccttagtagagggataaatgctgttctgttcccgcctaacccatcttgaaagaaaatctgaaaggatcaaactgtattcaagtaacctaatcacatcccagcacacagctcgactagttataaaaacacaaaatattaatatctagaaacacaaaaataatatctagcacccaacaaggtaaaattcacaatgtctagcattcaattgaaattttctaggccatcaaagaagcagtaaaatatgacctataaggccgggcacattggctcatgcctgtaatcccagcactctgggaggccaaggtgggtggctcacccggaggtcaggagttcaagaccagcctggtcaacatggtgagacctcatctctactaaaaatataaaaattagcccagcatggtggtgggcgcctgtaatcccagctactcaggaggttgaggcaggagaatcgcttgaacctgggagaaggagaccgcagtgagccaagatggcaccaatgcactgcagcctcattagagaacatcgggaaggaaactaaaggcttatttaaagcgcgagaccgtggcgcctttggactggaccctttctaatgatcatttagtatcaggctatgtgggagttgaccgttttgcatagcctgaaagccaacagtatcactcctcctctaggtgtggcagagatgtgagagaaggagactgacagtctgtgggtgtgtatgcagtgttgggggaagcgaggcacaggggacaatactgtggtgtagaaaactagtctaaggtagcatcaggaaattcatgaaaccaaaatgaatttcataacagcacaagacattatttgtttttgcctccctctcatttttttttttttttgaaacagagtcttgctctgtcatccatgctcgtgtgcagtggtgcaatctcggctcactgcaacctccacctccagggttcaagcaattctcatgcctcagcctcctgagtagctgattacaggtctgcaccaccccgccggctagtttttgtatttttagtagagatggggttttgtaatgttggccaggctgccctgtcattttttttttactagtgtccagtggagttttttaggggctacataacatgatactgtcattaatctaatggctaatgaaagggatatgtatatgtttttgtgtttaaaacaaacttctttggggtcctcaataatttttaagagtataaaggggtcctgagatcaaagagtttgagttctgctggactgggacagtggttgtcaacccagattgtacattagggtcatctgggaagctttaaaatagtactgatgcccaaccttaccgcaaaccaattaagccagaatctctgtggatgagaagtcttcattgtcatcatcaccatgaccatcatcattgtcaccgtcactacaccattatcatcatcatcatatcatcttcattatcattgttagtatctccatcaccatcatcagcatcaccattattatcatcatcatcatccccaccatcatcctcatcggaacttcacctgcatggaggacaatccactatgcattaggtgctatgctatttgctatactccttattctcacaactgcccagagaggctgatattatctcactttataacaggaggaatctggatcggaaaagttaaggtaagctaattcacagagcgagaagagatagagccaggattcgaaaccagttctctgctacatcaatgttcccagtccttgcactattgagaacctctttagttatgctttcacccctccaacaccacagtaaattttttctttttttaaaaaaattatactttaagttatagggtatatgtgcataatgtgcaggtttgttacatatgtatacatgtgccatgttggtgtgctgcactcattaactcgtcatttacattaggtatatcttctaatgctatccctccccgctctccccaccccatgacaggccctggtgtgtgatgttccccaccctgtgtccaagtgttctcattgttcagttcccacctatgagtgagaacatgtggtgtttggttttctgtccttgtgatagtttgctcagaatgatggtttccagcttcatccacgtccctacaaaggatatgaactcatccttttttatggctgcatagtattccatggtgtatgtgtgccacattttcttaatccagtctatcattgctggacatttgggttggttccaagtctttgctattgtgaatagtgccacagtgaacattcatgtgcatgtgtctttatagcagcatgatttataatcctttgggtatatacccagtaatgggatggctgggtcaaatggtatttctagttctagatccttgaggaattgccacactgtctaccacaatggttgaattagtttatagccccaccaacagtgtaaaagcattcctatttctccacatcctctccagcacctgttgtttcgtgactttttagtgattgccattctaactggcaccacagtaaatttttatagattttataagcaaattgtatttactgtgcaagaattggtttattttttaaaccatgtgttgcaaacatacaatggttaattgtgatatttgctcagtacaagatcatcagatcactacacagacttgaggtaattccacctaaaagcaaagagaactgaccccacattaactgagaagtctttacttatttattccctataaacgagccaatatgaagagaaggccttaatgtggttaactatgtaatttttttctgactttttgaaatactgagaagagctcatgactctcccatctcctaattctaccttggtggattttagactgaccacaactcatgggtaaatgagggaagacgaataagaaaccttgcttttttttcctccttgtttttggctggctgcagtggctcacacctgtaatctcatcactttgggaggccaaggtgggaagatcacttgagctcaggatttcaaaactggcctgggcaacatagtgagaccccatctctaaaaaaaaaaaaaaaaaaaaaaaaggcgacgggcggtgcgtgcctgtaatcctacctactcaaaaagccgaggtggaaagatcacttgagcatgggaggtcaaagctgcagtgaaccttgattgcaccacttcattccagcctgggtgacaaagcaggacgctgcctcaaaaaaacaaaaacaaaaccttaattttttggctattcttttctggtaagaatggtatagagatggggatgaggatggctattgtatgagagagcaaacagggtccaagcagtgctctgggctgtctaaggaccagtagtcagcttaacttctcaaatttccagggaaggagttcggagtggtagaatatcctgggtatgcccaaagcatcaccttgcaaatagcctgtcatgaataatttgtttcatttgttatgactggaaactggctttgtgtatgccagagaatgggggcaggaaagagagattggtgtcttgagctctctgtgcctctggggcagtgatgcttttcctctcatgtggaaggagagcatgactgaaaaggtgcacaaataaggtgtctgtgagagaaattaaccttccagatacagagacacaaccttccccaagaggtcctcattgctctgccttttttccttttttttgcttgttctaccattaataacagaaactgattatgacctcaaaagagaggagaaagcgactctccccaccctagagctagttaaccaccatatcttcctagatctcagttcaagagtcacttccatccccaataaaagcccttgagtgctgagcacctctccgtcatagcatttgtcctaggggtttttgtacattttcttgtgtgaaacttgggttgacatctgtatttccgactagattacagtttcctcaagggtagggatgtcttgcttgccattttcagttccagcatctagacagtacctcaagcaaacaaggccgaggggggtgcggatcacgaggtcaggagttcgagaccagcctgatgaacatggtgaaaccccgtctctactaaaaatataaaaattagccaggcgtggtggcaggtgcctgtaattccagctactcaggagtctgaggtaggagaatcgcttgaacccgggaggtggaggttgcagtgacctgagatccactgcactccagcttgggtgacagagcaagacttcgtctcaaaaaaaaaaaaaaaaaaagaaagagaaaagaacatcaaatgaatgaatgagtgagatgaatgagttagcagtgttggatttaagtgtcagattcttcccagcttgacttttttctttggcttagtgattttgaggtcncaagatttattttcctttcacaaaggtgatcactaccataagatcttcagaaaaagaatgtggcaagccangtctcactaatgcaaatctctataacaactgtatcagtactgaggtgtcataaatatggaccgatagatgaatacaggtaggatgggacacaatctaagatcccaggggggggagaccacacgcttggttagggagacccaaagtggaccgtgtggccagaagagtcccgcactgcactctagtgacagtgcagaaagtcactgtgggaaatctagaagtttctacaggttgctatttcatcatagcactgtgcaggccaacccttcctgctccactggctgttgggaaaagctttctcttttcttcctagccagggagctctcaaagtgttccactctctcacctccacccaggcgtccaggtgtggaggacacttgccggctgcttgtctgctgactcatcccttggtttcacttggaaaacctaccaccagctggcctctttccaagcatcagcctcctcattttcttaatcccttaggtgtgatctcacctccacacagtagattgcctcaaggcccaattccaatatgaataaaaatgattattttgtcatcttccaatcttccttttaaaatattattttataattccctttaggaggatcacctaagtgaagactatttttacctaagaaatgttaaaatgtaaagacatggttgtaatctggggattcctgttaaaatggctagcagacagaagtcagacgacaggctagaaatgtgtgaagagtggttgcctttgaaaggcggagttggtaatgattttcttccatttttccatgctttccaattctctacaaaggccttaatattacttcgataaccaggacctctgataacctgcccccaccgagtaaagacttagctgggaaagtcagcttcatgtgaggtaaaaggaaccaggtaatacacaattcccactgccaactgtcgggtgtgcaggcctgagcttcctgcatgtgggaggaaagagaaagaagagagaaactccaagatccaagagatccagcaagaaggctggagtctgaggacgcagaaagctgaatggcacagttaccactattgtgctgaggttctgtggcctctgggtctcttgacaactgggcaaagacccacagaaaactatctctagaccctacctgtgggaggggaaagtgcttcagatcatctacaggacagccacctggacctcaaatggcttacagttccttcatccagagggtcttcatctagtacataccaggtgctaagcctgggtgctggagacatgacggggaacccatttaccatggctttgttactgtgacattcacatctagggaaagccagcaaaggggagggatcgaggagagcttgttaggcagagaaaatacccaagggcaagggagaagccagcctgttctgagcacacacagtggttccatctaactgggcctcagtgccaggttggactggagatggggctgaggagctgtcacagagcattctggacacagatgtcacatagtcccttgaggttagggtccttaggcatggcagcattgctttgagtttttccttttgtaatgttgccattcatgacaatgtggaagatgggtccttgcagagaagggcagggctgtgagaccagttaggagactaagatgtgagccaaggaaaatgaggaacacctgaacactggggcaggtgcagggcccagagagaagcagatggcttcctgaggttttaagtaggtagaatcaaggcagctggtaaagatcttttattacatataaactggaataagccatctgctccaagacaaaagagtaggcggaaaacaatacaagacagaaatggaattagaacaaacctgggaggaatgtggaattagagtagagagtccaacactggctgcaatcataaaaatgtaaaacaaacaaaaatttgctaggtgtgcttacttagaaataattagctgtcatattaagttcacttgtgttatggcttaaatgtgtcccccaaaatgtgatgtgttggaaacttgatccccaatgcaacagagttgagagatgggacctttaaaaggtgattaggtcataagggttctgccctcataaatgaattaatactgttatcatgagagtagattcctgataaaaggatgatctctgcctcctccccacagccctcttgtgcatgctttcctgcctttccaccttctgctatgggatgacacagcaagaaggccctcaccagatgcagctccttgatcttggactttccagcctccagaactgtaagccaaacaaatttctgtttattataaattacccagtctcaggtattctgttctagaagcacaaaatggactaagatcattagattatcattttttatcagactgttgaagtgaaaaataaaaatcaaataaagaaattaagagagctgcatgcagcagctcatgcctataatcccagcactttgggaggccaaggcaggtggattgcctgagctcaggagtttcagaccagcctgggcaacacggtgaaaccctgtttctactaaaatacaaaaaactaggccgggcgcggtggctcacgtctgtaatcccagcactttgggaggccgaggcgggtggatcatgaggtcaggagatcgagaccatcctggctaacaaggtgaaaccccgtctctactaaaaatacaaaaaaaattagccgggcgcggtggcgggcgcctgtagtcccagctactcgggaggctgaggcaggagaatggcgtgaaacccgggaagcggagcttgcagtgagccgagattgcgccactgcagtccgcagtcccgcctgggcgacagagcgagactccgtctcaaaaaaaaaaaaaaaaactagccaggcatggtggtgtgtgcctatagtcccagctacttgggaggctgaggcaggagaattgcttgaacccaggaggtggaggttgcagtgagctgagatcataccactgcactccaatccagcctgggtgacaaagcaagactacatttcaaaaaaaaaaagaaagaaaaagaaaaaaagaaaagaaaaagaaattaagagaagggcaggtattaaccccaaatatcccaccatagggacacattaaagtttgcttggccactcccctagcataatatatggaatgtcttcaaggaccctctgttgtaaatacaaggccctgctggacttaatacaacctgcaggctttgagatccctactctgttgccatctctcataggatttgcagaccaaatccaaatacttaaaatagcaacactcacaaacatgcaaatcagagcagaaaagaaacttctaaaaggccctgaaactacactttatgagagaagacaatagggacctgagggtggtagaattttctctctatgcatctatgtttccagggctcactttctcaataaactcttaaattgcttttaaagtaagggaacaagcaaacattacatttaagagaaatcaatttcataaagaaggggggatgtccagggtactttgcttccatgttttgcttccatgaatttgtgtttaacagaagatgcagaaaaacacacaattattgcaaaatcaaggaaatccactctaaacatcccttggtttcccaggccagtgtcacaactgaaaacacatattgtggctaattatgtgtcacaaattagaatgacaaggcaagaaaaaaaaaactctctgattaactaatagcagccaacacagacagcctgtgtagctcgactctgctggtttataaaaggcagaagaagcaaacggcttctgtgaccgcaacaggaagggcctctgctcttaataaataaataacatttaaattattctcccccatttgcaaagcattttccaactcattatctcatctgaccaggtattattgtatctgaccaagaacttgtatacnaaataaagaataaaaaataaatatgggccangcacagtggctcatgcttgtaatcccancactttgggaggcccaggcgggtggatcacttgaggtcagtagtttgagaccagtctggccgacatggcgaaaccccgtctctactaaaaatacaaaaattagcccggcatggtggcacatgcctgtaatcccaactacttgggaggctgaggcacgagaattgcttgaactcgagaggcggaggttgcagtgagccgagactgcggccattgccctccagcctgggcgatgagagcgaaacttcatcgaaaaaacaaaaacaaaacaaaacaaaaaacaccttagaagaagcgttcctcctcttgctttctgaagacactctacgctgaaacagtaactttcaataaaccatctcttctcaccgcactctgcgacttgccttgaattcctttgtgtgcaagatccaataagcctctcttgcggtctggatgagaaccctttttttggaatactctgacacaacaaattgcagaaagaaagtctcacatgtataaaataagcaaaaagattctctggcatctgaagaaacaatttccttgtcaatattagtatcactataagtgtagaacaacctgttgtatgatgctacataaagtatatgaatctgaatactgttggatacaaagggagactatnnaatgtaatacgtcgcccgaaatgactacactgttggtgatctttctttcaagaagcanaatattgcctcnaacatcctgtacatggtataaaattttacccagcaagaacaccaatacaacggggggggcgttctttgtgaggggtggggaggtcaattttttggaacctgcagcaggtaacacacaaaacttccacagctgctaccagctttccaggagagcctgtgtacctggagaggagaaggcaagtgcttccgaacttgacttgatgtcttagattctgcaatgcgtagtctgtagggacaggctgtagcttatcctataggcttgggctggagtcagcaagcatctgggctggcagaagataaaagatgcaaaggtggaggaaagcatacgtggtctggaagacagacttggtgggtgggtggctgctacaacaccctagttagaggtagaggggtaagtcagtgtgtcttctgcacaggcctcttccccacctcattcttcatttcccatacagccttgctgagttattcacaaacatctgattcaactggaagctgggttgaggatgacctaaaggactagtgtgatgcctgcccaggggtgtgggcccatagtcagagtccagagcctcctctcagcttttagcacatctcacccacatcctgggtccttaattagcaatatgaaagcaagccaagtgacaagattttgtccctgggaagtccagaagcactccttttctcatttgtataagcataatgatttgcttacataaataatcatgaaaattcaaatccctctcagaaatcaggtcataaaaccatgaaatgcagcatgtgggcaagaatcacagggaaaggtaggtcttggaaaagaaaggatggcagggaggaagaaagcagggtgccaggggccctgggctgctgtccaagtcaggtggctcaccgtctctgagaacatttcactttctggtaaatggggcagttggagatagaagggttgggtgaatgccaagagtgagcacagctgaggtcagtgctgtgcctgcagtccaggcgggagtagaaatcctgggcccatcttacctccgacctcatttcctcctctgtaataatgtgggggtgggggaaagttctggtcatcagccctagcattccatggttcatttcctcatcagtgatggaaaatcaccaagcaagagaacaggatggagaataaccggatgggtgcaatcggaggtgctatttcaggtgaggtggccagggaaggccctctgaaagggtggcttgagcaggtggctgaatgtacagaagctgccaatcatgaaagatctggggtacagcatgccaagcagaggaaatgcgagtgcaaaggccccgagattggatgtgggcttagcacaaatgtggcatggcaagaaggccagtgtggctgaagcagcatgaacaatgggtggaggggctgagaggacagaggagcaggaaagagccaggcttgggtaggagaggtgtcaacttgatatatgatgcaaagcccttggaggttcccaaacacaaaagcaatgatctaatatatggttttaaaaatgccactcttggccgggcgcggtggctcacgcctgtaatcccagcactttgggaggccgaggcgggtggatcatgaggtcaggagatcgagaccatcctggctaacaaggtgaaaccccgtctctactaaaaatacaaaaaattagccgggcgcggtggcgggcgcctgtagtcccagctactcgggaggctgaggcaggagaatggcgtgaacccgggaggcggagcttgcagtgagccgagattgcgccactgcagtccgcagtccggcctgggcgacagagcgagactccgtctcaaaaaaaaaaaaaaaaaaaaaatgccactcttgctgtgaaaaattgaccctgggggaaggaggagtagaaatgtcaaaagtggaagcagaccactcaggaggtcagggcaatggactgtgcaggagagactgacatcttagactcgggcaataggagagaaggtggtgaggattatattctgggcataaaggcaacagaactagctgatggcgtcaacgtaggagatgagggaaagaaagaaatcaaagggcattcataggtttgagggttgagtaactggggatatttaacagaaatggagaagtctggggaaggggcaagtattgtgggggcaggggtcaaaagttctgtattttggccaagttaattaatatttgagatacctcttaggtgtccaagtgaagatgtcaaacagtcaattgaatacaaaatctgaatcttagcccaggatggtctcacacctgtaatcccagcactttgggaggctgaggtgagaggatcacttgaggccaggagtttgtgatcagcctgggcaatagagcaagaccctgtctccacacacacacacacacacaaaaagtcatccaggcatggtggcacatgcctgtagtcccagctactcaggaagctgaggcaggaggatcacttgagcccatggttcaaggctgcagtgagctataatcacatcactcaatactacactccagcctggatgacagagagagacctcatttattaaaataaaatttaaaaaaattaattaaaaataaatccaaatctttcctgagattcatattcaggagtaactgtcatgtagaaggcatataatgccatgggtcacatgataccatctaatgaatgccactggaaaagagagaatagctaaaaactgagcactgggcacaccagcacagtgaggttggaaggaagaaatggagctaacaaaggagacaaaagaggagtagccagtgagaagagagaaacatctggagagaagagagagcagcaaaaggtgggtgaaggagaatgtggtccaccaggcccaacaatgctgagcagttgagtaagtgaggacctggccactgaatttggcaagaaagaggatgtcagcggccctagaacaaaagtgaagaagagcttgaggacggaagcctgacaggagtgaactgaggagagaatgaaaggtggagacatggagccaaggagcactgagactcccttgagtagttttgctgtaaaataaaagtgagtgcagagacggggcagggggacagagaaatgcaggggtagctggagggagccacagaatcaaaagagggtttttgtgtttaagatggtagttgtcacatagcacattagtaagttcatgtgaatcacaacgtaggtgagacagatcactaatgcaggagtcaaatccttgcagagcccccagaggaggtgatgaagggaagtgatggacatcattcagatgcaagtaggttagcaattcctggggtacaaataggaggtgactcctttctgattgctcctgttttctgaatgagatagcacataaagtccactcagccatgttagctgttgaagtccttgtggctgtcatgcctgtacagactgggctctcctctccagcatttcctctcagactaagctgagctgcactagccgctgccacatcctcttggggccatcctctgccacactccacatattgctgtggtttgcttgcaacccctggaaggtcctactggctgctcctagaagagtctgggcggcatctctcccttactcgttatcacatggtgctgtaagcagtggccacacactttagctggtgggatgggccatcacaggcagtaaatgcgaaagactgctcagattttaaagcacccatgaatcagtagaatgagtttagaattgtagtcatcaacacacattaaaaaaaaaaaaaacaggcactaaaaaaattagttgagtaggataaagccataaaagatattaactacaacccagataggaggtgcaaaattgtccttacataaatcagatggaaaaagttgaaagcagataagataaaataggtaagcatgacatttaaaaggtattcatgggacgtggttacaaaaccaactcacaactaaaaagtcttaggacctctcgctgacttaggagcctgatcccaactttgagaatgactcagtgtgttaccctgtggctagtgtagaccaatgatcctgtctcagagtcactagccaacagcccatatcaagtaattgaaactttgactcagaaacctcagtgtcagaacctttgacttaggaaccacctgtagtggttaactgcaatttgcaccccttagttcagggctttacaacaccgggggcggggagggggaaggcatagagctgatgacctaaaggaaacccattgcagcaacgcttttgtgttaagtttacaaataagtgttgttttagaatcctccaggtaatgcctttgttatttaatgtgtctgagacaattctgcacattaaagaatataaaatattaccttgtaattccaatttgaaatgtgtaattgacattagacttctattttaatttgaaatgtctaaaacaatgtggttaagtttgtaaaaggtgtgtgaattttgagtctgatttactacatttttttttaattttctttttttttggagttttagggattgcttagatggctagaaagatcgctaggcacatgtccgatgtgtgtacgtgtgtgcaaataccgtgccttttttgttttcttttgttgaaacagagtctcactctgtcgcccaggctagaatgtagtggcgtgatgtcagctcactgcaacctccgcctcccaggttccagtgattctcccgcctcagcctcccaagtaactgggattacaggcgcccaccaacacgcccagctaatttttgtatttttagtagagacggggtttcaccatgttggccaggctggtctctaactcctgacctcgagatccacccacctcgacctcccaaagtgctgggattacaggcatgagccaccatgcctggccaatactgtgccattttattatcagggacttgagcatccatggattttggcatccataggggtcctgtaaccaatactgcacaaataccaagggacaactgtattctaaaaagaccaaaaattaataagcaggacgctgaaggtaattgccccaataaagtcatgatcccttgcccagtgtctgaacctcagccagttttcatactcaggacctattggctgcagaggtggtaggaaccatatgagaatcctgcaatatcatggcaagtatgcactttaatgatatctgcagtccttccccaaaaggaccttacatttaccatactgctatgtcctgcgtgagagggtaatactcagattttttttttttttttttttacacaacgtcttactgtgttgcccacactggagtgcactggctcgatcttagctcactgcaacttctgttttctgggctcaagtgattctcctgcctcagtttcctgagtagctgggattacaggcgcccgccaccatgcctggctaatttttgtatttttagtagagacggagttttgccatgttggccaggctggtcttgaactcctgacctcatgtgatccgctggcctcccaaagtgctgagattccagcgtgcgcggccatacccggccgggaattctttatatattctgaaaactaatcctttgtgagacataagtgttgtaaatattgtatcccagtttgtggcatgtatttttaatttttaatggtgtctctcaatgaaaaaagcttaacacttaaatgaggtcaaattgatcacctttttatttatggttgattcctttggtgtcatgtgtaaggaatgttgttccttcctgtcccaaagttgcaaagatttcttgtgtattttgtcctaaaagttttaaagttttgcttttcccatctgtgcacatttcacatttgctacatctcactgactgcttcctctgctgcagagcaagctccatgagagcaggaggcatgggtcctgcttcttgttggtccccagagccctatgtcatgactaggacctggcaggggactagtgagtagctcctgactaactgactcaatgaatgaatgattggatgattgaacaaagtggtatgggagttcacagcgagtaagagatgccttagaagagatgaagaaggagatggtatagggtagtggttctcaattctgggtccatggtggactcacctggggacccttaaaatgtaccgtggaggatcccagcccaagagattctgtatgactggtctaagatgtggtctgggcaccaggtgatcccagtgtgcagccaggcctgaggccactggatttggtggtaaatgaggtaactatcaagggtacagacgttggttgccaacaggcttgggcttgaatttaagctttgtcactgacttgctgtgtcctcctgcactcgttgagcctgttttctcacctgagagatgggtgtgataacacctacctgctgtagttgttgtgagagttagaggagataagcatgttcctggaatgaagtgtgttcttaatccatcataggttttttgcttgtttgtttgtttgtttgtttgttttttccttttcaagaatgaggttgagccagactttgacagctgggtgggaagtgaacatgtggtgattgggagagaagggcagtttatgtgaagggaatgtaataattagagagtgggcgtgggaagacatgctggggagagtgagcaggccggttagccctggtagagggtgcaagagagcagtgcggaatctgccagggagacaggtgggtgaccagggtgccaagggtgtggcttttcccaggttcccatggacacagccatcctcccagatgcccagcctagctgtgagtgagcaagagttctggattgtctctctcactctgtctttttctctcattccagaaacaaagcagtgactggtacttaggaggagaatcaggtcaagttgggagaaacttgcttctgctcaggggagcagaagcaagaatggaggccccacccatgctggaagatgatgagggttttggttcagggaggaggaatattggggatctaaaggggcctgggagtggggcaggaccctgccttaggacaggtagaaacattttctataaaaaatggggtggaggttgatggtaggaccaggcatctttagttggctccctggagtgtcaagcccttgagatggtctttaaaagccatgcagtggggtttgaatctggtgttcaagctcataggttattaacataatgacacttggaaactatttgggagagctcaagtgagtggcctggaagttctgtgttggtgcaggaggtgacttaggatgtgctgctccagactcatatctttgactgcacacctgatgcttcatctggctatcctgtaagcaccttcaacttaacatgtcctacacagaactcttgatattcctgttcctcccccagttcctcagttcttaccaaatgttcttccagttacccaattgctcaagtaaaaaatctaagtccttctcttggatttctgcctgttccctcaacatcccacctatccatgagtgttctgtgggccctgcctctgaaataaatcctgcctttgtctcccagttcactccagccacccatcctggggctgcaccctcctccttccaagccctctccctttccttcctggtgctgcctgtcatgtcaagcatatgcatcagtgcgaccaggacatttgaaatgcaaccagtacaattgggcgcggttatgcctaccagtttttcttccttaaacattttatatttatgtttgaaagcatgccacctttcttcacttgccaacttgacagatttattagttgacaacatccgctgatagcatcagtaataagttaattgtttttgcacatgtagctttaattattctcattatcatttataggagttattctttgtaaagggtaactgagttttccaaaacaaacagaaatttggggtgggcccatggagcgtgactcatgaaatcagattcttagaaggacctcggcaagtctctgggttgctgttaatgagcctggctggctgccaggggtgtgtctgccctttatgaggccaccactgttcaaatgcttgcctgcagcattacttgcctaggtagtgcttgtttctactgaactgtcagggatccaattctttgtggtctaagtaacaatactcagattcacaaggaattgattaataagccagaatgccaatgtattacatttttgatgaagaccatatttacagtgattgtatctgctcaagctcaaattaggattagagttctgacaaatacatatgtgagaagtatgaggttaaatacttgaaatttggacttttctagaaaatctgaatgtgattgccattcacatacctttctggggatgatgattcttgtacttttattttaaaagacatagaaaactaacttaagaatcagattgcttggctgggcacagtggctcatgcctgtaatgccagcactttgggaggccaaggtgagtggattgcttgagctcaggagtttgagatcagcctgggcaacatggtgaaatcccatctctaccaaaaatacaaaaaaaaaaaaaaaaacaaccaaaaagaataaattagctaggtgtgatggtgcgtgcttgtagttccagctacttgggaggatgaggtggaagaattgcttgagcccaggaggtggaggtttcagtgagctggggttgcaacagtgtactccagcctgggcgatagagtgagactccgtctcaaaaaaaaaaaaatcagattgctttattgctggttttctttctaaaactgagattgggtcccatcatcccctggcccccattggttaatggttcctcctttgtctattgaataaaatacagatgtctgcttttggcaacatggttgaatgtagacactgcagggtcttcctgactcaaaatgatttaggcttagataaaacacatttggaaatgcatttctggattaacaccaaggaaaggagatctctttaaatcccctttctgttcccccctccctaccccctccaattgggcttaagtaagaagggtggttacccgctagtaaacccccttcgaagggggtcttctcctctaagggaaaacccttgttttgacatttgcttcaatgggcccttgtattttgttccttgctaaacgggtgctaaaccaggggcctcctcttaaggcttttagaatatttgcacactttagaaatggaaatgtttttggggggcgagttgtcttaatatttcatttttctagcttgtgtgacatccttttgaaagcagcaattctggcctttgtgagagatggtgaatgcctgcaggtgtgtggaccagtgcgtcccttccttcctacatgcacggcccccagctgggcccagcagagtgctgttacagaataatttccaagggctgtgtctctaacctttggtcttgtcccccattgctgtagatttggccaattgacttcataagtgcctcttatgaacatagatgttggcaatggaagttgaggaccagtcagtggttgttttattgaacacacagcgtaaatcccaacacaatgctgacctaagagaattccagccactctgattctcagtctctttatatctgaaagggttctgttccactttttcccagatcaaaatgtccctgcagctactcagcagagctgtcgcaacttatacgtagaagaggtaacagtccacaaacagaaaggcacaggacgagagtggtctgggtgatgcttcctgtgggggaaaaggtgatgagggtgcatctgcacacctatgttcataggtaagtctgggaggaggtgacctcccctttggttgaggtgctgaggcgtcttgttagaatggcactattccatttatctgatgcagtctgtgggaattttgtggtatggccaccacaggtaccatgctgggaacaatgccagatactgcctgctaagccacagcatgagtcacatgagcatttgtgggctttgggaactaaagttattgaacgatagttatctgaaaaggaatttagggaaaggggactttagtccagcgaacagtttgcaaaccagggggaaggcagccttcagcgtaaaatgaagacgtgtgtgccccaaataacaaagggagagtttgtcttttagagagtaaatgtccacgcaaggttccacttaggcaaatgaaagatgcaaacttgcttagttctgatttgtttacatttgctgaattcggattggtccgtgcaggcttttctgggaactccaaatacatgtatgacctctagtcatacatggcaaatggccgcttggctctaatttgaatttaggcccagttagtcactcaggattaacctttttcagggttcacagctctgaacaatggacttagacctgcaggacataatctgttcctaactctgggactacctgtgccttttgactgtgcccagtgagcagctgtggctctgggcccagacccacagggcgataaggcacagaggtacgcatggagcaggctgtccttgctgagtgatcatgaagatacacttacatagagcagcacttttccttccagtctttgtgatttaactcattagatccttataacaagagtcagtcctctatttaacccatgaagcacaggtggagtccaagcttagtttgtgaaggatgagccaaaaggattcttctcttgtagacctcaagctcagctctctccatgggccctggagtaggtgagaaggcctctgtcttccagagcccactgccaatcatctacattttctgttagcccaattctaggacattgctttaccaactgaagggtgagaactatcataagttataaaaatcaattgaaaaacaaaaaggtacagaacagaaaataaaagatgagaatctattaaacatagtgatgttactggaaaagggggtctcaaaccagaccccaagagagagtccttggatttcacacaggaaagaactcaaggtgagttgcagggtgcggtgaattgagagagtttattgaaagctattccattacaaagtagagcatcctcagacagcaagtggaggaacatgccatcattaaatttttcttatataggaatcttgtctatataaagactaaactaagctgtggctatgtgtgggtgggccgacagcatgaaaacatttattctcctattgatttaaagagaactatccttgacattttagtgtgtttaagtacatcaaagcataactataattatcttgaaagcatatatttttatagggattgggacatctgggctttctgttgttgtagaagtttgtccttgcagggattaccaagccacttccttagctgtaaacatcttagggccatgggtcctgactggcaaggaatgtgtcttgctagttttaagatgggcttgatttgaaaatggtgtccatctggctctcctaggctcctgctttcctaacagtaagggtaaatgctatgttatgaaatgtcatttctgcctttagcttgcaaactcttgatggtgaaattctcctgtccgttttcagtggggtatttattctgcatccacgtcttcacaaggagctgaaaacaaattggatggaagcaactgggttttatgggacacgttaatgttttaatgtcatttggtgtggaattcagatgtccaagcaacattttacactacaaatctgcaactttaataatcactcaaagtacctgaacctcaatgctttcagacagacttggtataaagccaccacctctttctattatggcagccctatcctgaggacacaaatttctgcagggcttctggcatatctctgattaaacaaatgtcaacaaggttaaaacaaatgtcatctctgatttgtttgttttaaagcctggatttactcattgaatatttcactcctactagcatgtcttgtagtagttttcttcagggaccctaattattgctattaaaaatatgtgtgcagctacatgttttttttttatcaatttgcaatgaaaactttaattgaataatctattagtgttattatttgaaagtgaaatcttttccttttgctttcttgttctcacacatagtgcagacagtttccacacgggctcataaaaggaatgattctgccttgtgtgaactttttgcctttattgttaattgcaccattttgtgactggcttcttgaccctgttgtaaccaagctcataatgtacattatttcttattttgcagttgtagacacttgaggaagttcccattctttgtttcttcttgcttttgttccctgtgataactttttcatgcagacattttttttttttttttttttgagaccgagtcttgctctgtcatccaggctggagtgcagtggcatgatcttggctcactgcaacctctgcctcccaggttcaagagattctcctgcttcagcctttctagtagctaggattgcaggcgtgcactaccacacccagctaaatttttcaaattagccaccccacctggctaatttttgtatttttagtagagacagggtttcaaccatgttggccaggctggtctcgaccaggtgatccacccgccttagcctcgcatagttgcaggtgctattctgagctcagggctctggcagctacaagcccaagatgcggtctccaacatgtggccattcaatgtcatggcgccctctactggtcctgggaagcgcagctctgccagtagctccagcagggcacagctgttaagtcgtgatgttctacaggtgaccaaagggcaatctctggactccttagccgctaggtcctctctgtagcaggacccaggagaaggcaggggctgaggatggctctcttagacatttgtgatgaaccaaacgtgtgcattcatgaaacttctgtgagcaagcaggtgagtagagttgggttataaaaagtcttagggtctcactacagagatggacttgctgtgtagatggtgcagagccgctgaagagttctacttggggtaatggtgtgattgggtttgcgttttaggaagatttcttggccagaatgaggcgggcaacccagagcagggagtggccacatgtgggtgtgcagttatgggccactaatccaggtgataaatggtgtctctgaacttcaggtgggggtgccacatgtctccatctgctctgtacccttgagactggccttatgggctgccttagtggtctgttgtcctctatctcctggttgggctcaggcaatgggagatcagagggaggaaagagagcttggttagagtgcacccgcgccccttcaggttggcagtggccacattcccctatacagaaggccacagtttctgtcagtggccctcccacagccccagctttctcagtgggccagccacctccccatcccttgctcctcctcctccagagagggttgtggatttccactgtcagcagtgcctggagctccaccatctcctgctgcttcctctggacctgcctgcagttttataaataacctttccttacattacctctagcatgcaccttttgtgtgtatactctgccccctgtcagcacatgactcatgccaaagagtttgaatttttttctccaggcaacgggaggtcattggaggattttagacattgagaacagatgtgtattgtggaaatatctgtctgactgaagtgaccaggatggtccaaaagagcgagaatttgaggcaagcaaaccatcagcaggccagcagcagaaatccaggtcataaacagggaagctgaggctcacagggttggatcagggaatgggagagggaagccaaacaattccatgagcatgtcagttgcacatatgacttggtaactatttttatttttatttttatgttttgagacagagtctcgctctgtcacacaggccagagtgtagtggcatgatcacagctctctgcaacctctgcctcctaggttcaaacaattctcctgcctcaaccttccaggtagctgggactacaggtgcgcaccactacacccaactaagttgtgtatttttagtagagatgagcattcacgctgttgccttagacacggaatattgattatttgaccagaaattcatgcagctaaccgtgacccctggcaaaataaaatagtgtatatgtacgtgcatatacatgcaaagaaatgagttgaaactagaaggatgtcaatcaaatgataacatggtcatcttggggtcggagtacatttggggatgaggggagctgtaaaagcagacttggaccttttcttctaccagtaccgtgtcatttgaattttggaaagaaaaaaaaaaactcagaaggaggagaaggagcaggaggagaagaagatggatcttaagtgatttgcccgggagcaccttgagaaggtgagattcaagtctaggtctaagctttctaattccatgagtgggagtgacccacgtccaagaggaagctcaaaaggaagatgttctccatcatctcttgctcatcctaacagcatgcaaaaccacatccaatgcagctcagaaaactcccaaattgccaaatttcattggaaacacttaatgctgtggtttccaatttcaactgtaaagtaggtatgtatgccattgttaccattaacttctcagaaatggagagagctctctttccgcctcctccccctctgctgtggctttggtgagacgtgcactcaggctcacctgtctccatgatctccagtaagtacacatgagcagagaggcctcagctcagctcttcctggtcccaccagggttgattctttgagaattctagaatgccacatcctaggccccccaaagaaatcctgcatcttacccccagaaatatgaatcatagcaaatttcaaatcaaccatcgtttaatactcacagactgggcacatccaaaaacatattttcagttttacaacagtgcctggtgcatatcggcactatttgtggaagcaataaatcgacacggagctgaaacacaaacaaatgccaaattgtttttataacacctgattttctttctgtttctttatgcagtttagttttgttttgcttaactctacctcagaccatagtctggtaaactcaccacccagaagctcccttgaaatgtgggtatgcagccactaggtggcaggagagagtttcctgcctggagggaggacagccactctgtccccgggtcaggccagggccaccctgctacctgcaaaattagcatggggctttatgaaccacagcttcctaataaacacaggatctgtttgatagagactccaaaacacgcctacctagtgatgaaagactcaacttcagaagaaaaccttcatggcaaacatcttcagagatgtttccaacttaaggttctgaacacagacgcttccccagaaagccattgtttctcagcacctgggagccttgctttgctttgcttacagactcgctgttcttaaatcactgccaagataacatctgtctcttctcttaccctctatttcgatataaggactcctcactcttgttgcttcctattggctacctctccacagggagaaatcgctgatttaacagcagtcaatatcccaaatctggaacagggaacagggaagcatttaaaaattggagaatttaggccgggcacagtggctcatgcctgtaatctcagcactttgggaggtcgacgtggatggatcacttaggagttcgagaccaagcctgggcaacatggcgaaacctcatctctacaaaaaaaaaaaaaaaaaaaaaaaaaaaaaaaaacccaaaaattagccgggcatggtagtgcacacctgtgagccccagctactcaggaggctgaggtggcaagactgcttgagccctgaggtcgaggctgcagtgagccgagatcacaccactgcacttcagcctgggcaacagagtgagaccttgtcccagataaataaattaaattaatttaattagaggatttaaggattttccctacagacacctccttattttctctggccttttctgactactctccctaactccctgctcctctggtctcccaaaactactccagaaaaaaaaaagggggggagggactaaaggaaagccaggtgacagtgccagtgtgacagatgacaaagcatctgcccgaacaaaccgtaggtccctgaactttctccaagacctgtctgtggacttacctatgaaaaccagttttagcaaaaaccctcctaagccagtttatcaagatccccttatcctcaatatccatctgattggattcttcatcccccaccattccccagtgatgtcaccaggcctttcttcagcaacagtagttagtgggtgtagccaggacgccccctcacccctgatatgcccttttagtaattcttcatccacaggttcccaccctgctcctaggctatacattcccatttgcccatgctgcattcggaattgagcccagttctatactgaggtcttacttcacctctcgccatagtcctgaataaaattggttttcacatttaaaaactgtccagctctggttgttccttgacacagggtaatttttattccatgtgatagtttgccttacctcagcctacacccctcaaacctgcaactctatattcaagaaccagacagccctttccaacagataggaagaggctgccctggtgcaaaggaagaggctctgggaggaaggagagaacccgaaggctgccccctcctctagactgagctctgggatgggtggacgataaaacccagatacgtttagacatctgagcgtggagaggactttgctttgcttccacagggaccccaaggaaactgcaagccctccagagactaaaaacagcagaacagcaagaaatggcagcaaaggtctgggcagaatcatcctatgtgggcacagacacaaacagagtcccctgtggccccaggagagtttaaagaagatccagaggctgtcctattccatatctcagcagagacaggcccgtgagcctaaaagctgatcattaggacaagaaggacacgaactgtcctgcagcgtgaaccgcgtggaacaaggccaatcaccagacaccagaccagccagacacagccccgcagttccccaagaccaccacggacccatcgcccctcaccaatagctccaggctacatagaccccctccacttcatggatgtcctcagagcagaaaggggaggcaggagtggaaccctgacttggttcagttgaaacataaaatgactgtactattattgaattgctgaagtttacgtgaaagaaatgagatttagtttttggccacagtgcaaaataagaaacgaggcttcaactgagattaaggtgagttataggaaaatgtactcccttgaaggacctgtgaagtgtgttcgctatgagaaaatgaccagaatccacgttcttagctgcgggactcaggctgactcctgtttctggagcttgcacaaagggcagggaaatccctgtttcaggcacagtgatttcaatgtttaaaagaaaacaggtgggccctggcaatcatgataacatgtcataagtttacatctctgtgaggcaggtagtgtaatccccattttgcaaaggaggaaaccgaggctgaaagcagctacatggtctcttcaatgtggcccaaatgttggagaacagagcttaactgaatcagcaattctatacttagaactgactctctctttattatatctcactactaccttgatatttgaaatattcaacttttttcaatcaaaaaataacaataatttaggcataatgactactatgtcatttaatttcttgctgatatttcaatatcccatgccaggaatattgaaagctcagctccttaagagctgactatggcatcaactcccaacaaccatccttccagaaatattttcccctttcttttgttatagagtggcactgccctatatggtgaccacttgccacatgtggctgttgaacacttgaaattggcttgtcagaattgcagtgtaaagtgtaaaacacataccaaatttcaaagacatggcacataataaaaaatgtaaaatatctcattaacaatttttatattgactgtgtaagtaacattttgaatatattggattaaatacatggatgatgccccaacacccacagtcccttatcaagtctctacttcacatttttgtacttctgacttagaaatagcactggcgtctaagagcctattaatgtcgtcaataggttcttgggaaccacaattttaaacaaaatgacatataagaaaacgaataacattgaacaaaatgacattattcgaggacctgctgcatgttgtttcacttaaagtcagtgtccaagaacctatcagtgacatttagtgaggacttgctgtccttcctgtttacaggaacctgggcaagttacttaattcctctaagcctggtttatatccctgcaaagagagaaggataataatcaccagtacttagtgatgtcgtaaggagaaaataaaataataaatatgaaatggctgacagtgtccttgtcacacagaagatgtgtgatccacagtagctgctattgtctgcctcacttcactagtaatggtccagggaggcctttaatgtgcatggtgcagtacattcacatgttggacatgggtgaagggaaagaccaggctcatctaaacacaataggatgcttgtggtgttttgaggaggaatcaaggactagttatccacagctgtaacatgcatggatcaaaagagataaggcacacaaaagactttgtcagtagcaaagcattacaaaatgcagagaccagctgtgggtggtggtgagtcagacccagcttccctctgtgcctggctgagtggttctgggcaagtcacgccatctgtcttgatgcccttccccatctatagagagggagcaactgaggccccttccaatactgaagtcctttatttctgctactttagaaatatccacatttttggtaaattcaaatgatccaatgattccatttcctaatgttcaaaactagccccagaaacatctaaatgaatcaaacaaataaaatatttattgtgtatgttttgattgctgaaacttctattttagcaacacacacacacacacacagaacccataagccttcatctttccttggataaacgagccttcctgtctggccatttaagtcacgattaagtaaatgatttccaactcgccttttgcagcagttcagatgggtctttcctgcgtggcagtggccctcctgacttatgatttcctgtgtgtcggcctgttaccactgcagcttaactgaggaaacaagaacaaaacagcttctgaccccaagagactgttggaggcaaaggcttcagtcccaagaacctcacacgtggggagcccgagagcccagccctgaccttttctccagtaataacataagaaacaacaggcactggccttattttggatacaaagagtggtgcttttccttaaatcttcctttagtcagggctaccccttcatggacgccccaacatccatggttcctgcttgagtccctgcttccatattcctgcacttctcacttgaaatatccctggagtacgttaagcagccaggtttggaagttcttgctgtgcaggcgggtgtgtgcatgtcctctctctcaacaggacacaagctccccaaatcagacggtatgcctccacgccccttcccaagcctccccagcagcaccgagcatgtgaggggagctggggcccaggccatgatgggaagcactctctgcctaaagactagggtgatgcgccctcaactgtgggaatgagccccagctctggtgtctgcctcggtttttcctcctggacaatcaacatgaactcctcacccctcttatccactttgcataaactgaaaataacaaacccagggctctttctgtcacaggaaagggtttttttttataaaattaaacagagatgattcaacacacccaggatataacacatgggccatgaatcaagggcagcattgctctggtcagcctgttgtttgggcccccttggcagggctctcccctgaatcttcccctcttgactcccatcancacagcactccanctttgtgttacaggcgataaatgggaaaggggtaaatcattcttaattagagaaacgctcattaaactagacacccaaattctctggggggggatcattcttacaagcatgcccttctctcttaaagagagagcacttttttcgcaaataatgctgccatgaacatacggggtgcatgtatcttcgtaatagaatgatttctattttggggggtatgtacccagcaataggattgctgggtcaaatggtatttctggttctagatcttcgagatcttccacaccgtcttccacaatggttgaactaattcacattcctaccaacagtgtgaaagcattcctatttctctgcaacctcgccagcacctgttatttcttgactttttaataatcgtcattctgactagcatgagagacagtatctcgttgaggatttgatgtgcattttgctaatgatcagtgatgttgagctttttttcatatgttttttggctgcaagaatgtcttcttttgagaagtgtctgttcatgtcctttgcccactttttaatgggggtttgttttttcttgtaaatttgtttaagctccttatagactcacaataacaaagacatgggatcaacctaaatgtccatcaatgatataacggataaagaaaatgtggtacatatataccatggaatagtatgcagccataaaaaagaatgggatcatatcctttgaaaggacatggatgagctggaaaccatgatcctcagcaaactatgcaagaacagaaaacaattgttgcatgctctcacttataagtgggagctgaacactgagaacacagggacacagagaggggaacaacacacatttggggcctgtcaggggtgaggtgggggagggagagcattaggaaaaatagctaatgcatgctgggcttaatacctaggtgatgggttgacaggtgcagcaaatcactgtggcacacatttacctatgtaacaaacctgcacatcctgcacacgtaccccaggacttcaaaataaagagagacaatacttctcccttaagtgtctactgttgctttgcaataaaaacttcctgcctttcacttcactctgacttgtccctgaattctttctcgtgatggtgtcaagaacgtggacactggctggggctggagactcaccagcatccggagaccctcctgagccctccagcaatacaactttgacacaaactatgaaatcacagatccaagaagctcaaagaacccaagcacaggaaacatgatgaaactacatgaaggaacatcagaattgaattgttcaaaatcagtgataaagagtaaatcttaaaagcaaccagaacaaaatatccatcatatacgcagaaataaagataagtatgacagcagatttacaaatagaaaaaaaaacaagtgcagcaacagaaacaaactatcaatccataattctatacctagtgaaaatttctttcaaaacaaaggtgaaataaaaaaattattttcaggaatacaaaagcgaaaaaattaatcactagcattcatcactgcaagaaatgttaaaggaagtcctttaggcagaaagaaaatgatacaaggtgaatatttggatccctgcaaggaactaaaaagatccagaactgataacttaatgggtaaacatgtaattttcatcaacaagtgaatgaataaacaaatcatgatatatccatatgatagactactacttagaatacaaaagaagaactacttatgcatgtgataacatgaatgatattcaaaattattattgagtgaaagacaccagatcaaaacaaagtacatactgtatgattctgtttatataaaactctataaattgcatgctcttctatagtgacagaaagaagatcagtggctgcctgcagacaggaagagattacaaacggaaatgagaattccttaagagatgatggacatgctcattacccatcatatgtatacagccataatggttttacagatacatatatatgtacacgccaacataaatataagttatcaaattacagtaagttctgacttaatgtcactaggttcctggaaactttgactttaagcaaaatgatgtacagtgaaaccaattttaccataggctaattgatataaagatgagttaggtttttggtttttttttttttgacatgaagtctcgctctatcgcccaggcaggagaagaagagttaggttttacagcatgtttctggtcacaagaacatcatcaaacttgtaaataaaggcacaaaacacttctaatattaaatatcaaaataaatatgagttatacagaatttaagaaagattaataaaaacaagtaaaatcattatttatgggatttttggtaatcagtgagttatgtggtcatagtggaagtgggttaagtcaagaaataaatgtttgcaaaacaaaaattttaaagatcctctcctaccaccacacaaaaaacaagaaaacacggtgggctcgctaagcacttttgtaccactcgtatcttatgcgtttgtatgattattgtaaatgctttatgataatttttagagacagggtctcactctgtgtctcaggctggagtgaagtggtgcaatcatagctcactgcagtctcaacctcccggattcaagagatcctcccacctcagcctccagtgtagctaggactacagttgtgtgccaccatgcccatctatcttcttttttattttttgtagagacaggggttgtgctttgttgcccaggctagtcttcaactcctgggctcaagcaatcctcctgcctcagcctcccaaaatgctgggatttcggacatgagccagcagcaccttgcccagcattttatttcataataattataagtcattccttcattcatcttacaacccacttgttccagttcaggatctcgggtgaccagaacctattaacgttcacgcacaagtcagaaaccagccctggacaggacaccatcctaccgcagggagaacttacacacccacactcactcagactgggaccatgcaaagaacctaacgtgcactttggaatgtgtgttccatacccactagaacagctaaaatttaaaagactgaccatacttgagtgttgaacaggatgtgacacaactaaatcttttaagcgcttctgcgtaaatggcacagccgctttggaaaacagttggcagtttttcaagttaaatatacccaaactctatgatccacttctcaacaatcaaacaagagaaataaaagcaatgtctacacaaagatgtatacacaaatgttcattgcagccttaattatactagccccaagttgaaacaagccaaatgtccattaccagatgactggaacatacaaattgtggtatattgatacaatgaaatactacttagtaataaaaaagaaagagctattaacataagcaacaacatggatgaatctgaaaacaattatgctaagtgaaaacagccacacaaaagttacatactgtatgatcacatctacataaaattacagaaaaggcaaactaatctatagacagaaaagcagatgagtggttacctagggatggggcagaagggacgaaaggatggattgcaaaatagcacaaaaatattggagggatgacaaatatattcattatcttgattgtggggatagtttaatgggtatatatagagatcaaagctcatctaattatacactttaaatatatgtatttcattgtgcatcagttattcatcaacaagactataaaataatatatgcctacatacatttttaaatattcaaaatctcacagttatatacataaatgcaactgaatatgtattcagatgttttaacaagcagaaaggactgattaaactcatgacagcggctgtttctgggaagggtgtaggagacaagagatggaaaagaggatgagagccagaagagacccttgtaatgtttcctttcttttagtaaaaatatattgacagttaaagctgagaggtgagaataatagtctcatggcttttgtgtccttaaaatttcacaaactaagtgaaatgggagaaagcaaaaaaataaacttaaataaatgttatattgcccaaaaagagatttaaaatggaggttagacacatgagacttacgttctcaaaaaagtagaatctgcagggaagtttaacaactataaagaattaaaatctagcttctaccagcccaaagcctaaaatgttctgctttattcttccttattataattcataggtaatatattttatgtttgcaaatgaatgcagtgatattagatctctaagaggtgctaaaaatgaaaagtacatattccaatttttcccaattttccttctctttccatgaatgaaaaatatacatatttgatgatttccaagtttatacaaccgatctttctcttagttttctcttaccaaattccctccctcactcagccaccagccagtccaactgtgctacctgcacagcagccctcataccatccacactctcatcaggatcctgcctgacctgcgaggagcagcagcaagaaggagacagaacctccacgctgagcatctcagggctttctcagagactccagaggaccctgatagggacagagcctggccagcaatccatgctgccagctgtatgattgtgggcatgtaaattctcaactgaaaatgggtgtaataataacatgttcttcccagaatgagctttatgaagatcatatagctgtttggaactcagacaagcactggtaggaatacaaacaggggagccaacagcctataaataatactttaagaaagggcatgaatgtaattacttaggaacaaaaggcaaagtggagagatgcctaggactgagctggacaagctgcaccctttagtggctcagcccatgggctgacaaggaaaatggaggagctaccaaagaaggtggaaggattctgggagagtggccctcaccctgcccagggcagggctcagtgggagagagggagatctgttataaatgctgccaggaggtcgagtcatgtgagaatgtccatgtgaaaacatccactgtgtgtatctaaagagagtggctgtaaaacaggtcagggtcaaaggtcttattgtctcagatgttatctgcatgcattgtctcacgaccaagaaaactaaggagcatggacacaaagggttaggttgaagcaaaaatttaataagtgaaagaagaaggctctctgcagtggagaggggagtctgagtgggttgccactttgacagctgaatccaaaagcttttataagaaactcttctcatatctgcagctgtttgagtaacttctcttacctataaaactgtctgtataactctcccttatctatgcagctgtgggatgtctccaggtaagcataaagtgtagcttctcttgtttgtataactgtgggtttgttttaggcaagcccccatcccctccctgtgtaagctcccatggagcccaccatgtgcatatctgagaagtggaggaagctttctctgggagctcactgatcgtacaaagaacaagaggcttctgtgccgcttatctattcaggtgcagcctgagttttccccaggctgctctatttttgcctgtagctatgatttttcaggcaggctgcttctctgaagactagccttaactgtctacctatcagatttttccttttcttctccctcagctggttcccctcaccaaggctgagcaagtgaaaaggagggcacagggcaggccagtagtgagcagcaacaaggaactaagacagcagaaaccactcttcacacctgggttgaaaggggtggggagccaggactacagctcaggtaagaacataggtaaagagatactgttgttgtgttgtttttaactatgagaagcattgagctttaaatttctacaggaaggatccagttcagacaggagcacccaatattcagaagagaagaacatggtgtaaaggtcctgggaaggctgagaggattgggactcagaatccagagcagaagccgtctgtgaacagaagaaggacctcccccagtgtagcaagagggagggaggagggacagatgccaagatggttcaggaagaaggtttggtggtaaatgtgaggctgtgctcacctgctggcttcaattttctctttaaaatgtcagatggaatcatttgatgaaggccatgccatgcaatgaaatggcagtctgaggcatggagcagctccagcttagcccgtgtttagggtaattatggctccaacccaggagatgaatatgactagggaaagtgaagtccaaaaacaaatggtctcaagttgactgtgagtcttctgggaggctgagacgacaggtggggttgacaagggaaggggaacccacctgctgaaaaacatcaggctgttggctgggggaggggtgaggcctgtgttgtagagatggatggatgcctaaagttgggtaaaggtttcaactctaccctctgctgggtgtggaaataaacaaagaccacccaaatgagaacaaacaaagactatttatccagagcttgctctgacaagggagtcggcaaccatcacttgcttggcagagactcagaagtaagcaggggagaaagcctcatagcagaaagaagggaagtcttcatgtatgccctgagtggcagctgtagatgtgggtgagttgcaggtggctaactagaaatgggggactcctgtgtgattgattaggagcatgtttggctttctctggttggtcctacattggaagagggaacaaaaaatttagggcagttgtcagttattaatcaagtgttggccatttttgactgactgttacaggagtgactggctccctggattgtttgctagaaatagtggtcttcacttcctgcaagtctgactttctggtaataggcttcctgggttggctattgtggataataagtgggtttcctgagctgatttctgcagattgtggatcagagttattttatataaacagtctgaccattttccactggcatattccatcttccaagagctggccaagctgctgtcttatctgtctcccccagcccctccactctggctgtgaaaatacaagccactaggtgaggaatggggacaattgaagactgaaagcttttctttgctgggttcgcagagctgaggaaagaaatgacaacatccaagtgtctgccctgggccagttttaggactgtagtggtaatgcaaggactgtgtgagtttatattttcatttgtctctctaactaaggtggaaaaaaaaaaacagaaaattgtctgtctgcagtctctgcaaaagtctaacactgtgcttcccaacattgcagccattagccacaggtgagtatcaagcactttaaatgagactggtccaaactgagatgtgctctgagaataaaacacacagcagatttcaaagacctagtacatgccctgatttcaagctatattacaaagctgtggtaatcaaaacagtatggcattgggaaaaaaatagacacattggtcaatgtgacagaatagagagcccagaaataaacccgtgcatgtatagtcaactaatctttgacaagagtaccaagaatacacaatggggaaagtctcttcaataagtggtgttgggaaaactagatatccacatgcaaaagaaagaaattagacccttgtattacacaaaatctaaaattaattcaaaatagaaaaagacttacatgtaagatctaaaaccataaaactcctagaagaaaacatagggaaagagctccttgacactggcattagcagtaatttttcagatataacatcaaaagtacaggcaatgaaagcaaaaacaagtgagagtatatcaaactaaaaagtttctgcacagcataaacaatcaacagagtaaagacatgacgtatggaatgagagaaaatattgacatctgacaaagggttaatatccaaaatatataagtaattcacacaactcagtaacaaaagccaaataacctgacttttttttaaaatgggcaaagtacctgaataggtattcctcaaaagaagacatacaaatggccaagagatgtatgaaaagctgcttaacataactaatcatcagagaaatacacaaatcaaaacaagatatcatctcacacctgttagaatggctattattaaaaaatgagataagtgttggccaggtgtggaggaaaggaaacccttgtacattattcataggaatgtaaattagtacagccattatggagaacagtatggagattccctaacaaaattaaaaatagaattaccatatgacccagcaattccacttcaaggaatacattcaaatactatcagtatctcaataagatacttgcactcctatgttcgttgcagcgttattcaccatagccaagatacagaaacaagttaaatgtccatcaacagataaatggataaagaaaatcaggtacatatatatatacaatggaatattattcagcaaaatcctgacatctgagataacctggataaacctggaggacattatgctaagtaaaatcaaagcctgacacagaaagacaaataccacataatctcacttacatatgaaatatgaaaatgttaattttatggaaacagagtagaatggtagttgccagagcctgagagtagagaaaatgagatgcttgtcaaatcaaatcatcacattgaatatatataatctatttgtcaattaaatattttaagaataaaaaatacctggcaccaaaaaaagaatgcaaaatgtctcaacaatgttatatgtattgcattttgaagtgataataatttgaatattaggttaaataaaatatatttgaaaaattaacttcacctatttctttccatttttgttaacataggtacaaaaaaaaattaaaattacctatgtggctcatgtaggtggctcacattatactttgatgacactatacaggctggtgaccatatatctcttagactagtctaagtgatttaacagtggttccagaaagatccaggtttaacaccaatgaaagggccagctggcttagcccagcttgtgtgggaaatgttggggagtggtttaagacagggaaaagcaaaacttttgatgctattgactttttgaaaaatcttttgtggctgaaaaaaccaaaacattattgctcgagtgtgtctctaaagcctttcccccattggctccactatacgcactctcctggtttcctcccctctagccgctgtctttggtctcctttctgattttgctgcgtcctctgtcccctgaatgattgcttctccactacggggtgattttgctccccaggggacatttggcaatatctggagaggtctatggttgtgtttgagggtgttgctactgccatctagtggggagaggctaaagatgctgttaatgcccaggacagtccccataacacagaattattcagctcaaaatatccatggtgccaagatcaagaaaccctgctcaaatattagcatgtgctgaaggcccttctctttcctttagcaatatctgcctccttagggatcttttctagtctcagtggtttaacatttaaaatcccaaattaggcaataaattgggccccaaacttcgttagtataaaatgtagaactgtgttattagaaggctaataaaatgacctggtgagcatctgcagctagcctctgagcaattctggggaccacgtgcaagataaatccatctgttccctctctgtaatgtggcgctaccttgtggccgatttttcctcgggttaaatatctctggggatgcaacttgtcgtggttaatggctgtgtgaggccagcgcgtggtgataaaggaatcaatcaagacaatattgaatttagaaaggcagatttatttagagaaaaggagagatacgttgcaagggagcaatgggcaatacagcagagggaaggctgtctgcaaagaggcaagggctacgtatgacgtagggctgcttaggctgaatgcttgcagacaagatgcttgcgtgcaggtgggctgtgagctgagtgcttgggtgctagtgagccattggcagctgaccctatttcttggaacattcgctccctgcaagcattttaatgttaaaccgccaggtcagtttgaattttcttttttctttttttttttttttttttgcctttagtaggacctgccgttgtgagactatctgaggtaaattagacaccctcctggtttaagtcaccgctccagtgactaggcagggagctcttccttgaagagggtgtgggcagtgggtactttgcatgttgtccacaccaggcgagctgctgcttcagggcctttgcatttgctcttttctttgcccaaaatgcacttctctcactgttcacatgatttttctccctcttttccttttagtctttgcttaaatatcaccttctagggaggccttcccacaccacctcttcaagatttgagggtatgcacccccacccctagccttcttatccctctccactgctttcttctcaaagcacttgttacgttcaaataaaatagattagttactttatagttctaattttactattttttgtttacttcatcaatacccatgtaatctctggaaggaacgtttctttttgtagtgtatttctagcacctagaacagtacttggcacatggcaggtgttcaaaagtatttgttgattattttctcaaagggcatggagtcttagaagtttgagaacacagttctaagcacagctgtttagagactatggatgatgctaatggctgtattcccagtaggtggggcaattctcaaattgacctggaatccttgagatctggggacagtcaccaagcactgggctctgtggggagagatgtgctggtttttagagaggagaatagcatcctgggggacttggccccagggctttcctgtcccaatctcttcccaactgagtcccagaggcaggaggccttgtctgtagctggtcagtcctgtaactgtttccctcccatctacacagatgcaaagaaggctgagaaaagcaagctgtcaggtgagcaggggccctgactcctccccagaaggcactcagaacttccatagggcaactggaaagaaggttctacttcctcaccggcagctgttgctggggaaaaaaccagcctcaggccctaccctgtgctgagaacctgaatccagtatcaggttctccaacaaacttggatccagctgaccctcacaaggggtcagatgcaaccttgtagcatatggaaaatggcagcaaggtccttgtgtggactatgcctagaatctaaattaagacaaggcctcagaggggctaagtgacatctgtctccaaagtttcacagctagtgtgtgactaaatcttgattccaccctctcaggttttaccataatcccaaaaaaggttgaaacaagaaaagttatctttgggcaattacctctttctgttccttgctttacctactaatgttctaggctcaccctctggtctgcaatctcactgaactgacagatccctcatggcctaaagggttttcacactgggttgactaggctctcccattgcctgtcctactgtctaaggcacctcctgggtagggtgcccagcgtcattctgatgctgcctgactttccttccagctacttttgaaacttggtatccatggcagaggcttaaagggcatgttccaggtacttttatttccaaattccccagtggcatcaaggaaatcagcatctctggatagctctactaaggcttagttctcattgtccaatctagctcctgggtcatgggaggcattcaggaaatatttgagtgtaagagtgagttgctttacctccagaatatccttccaatggctctgaagcaggctgtggagtcctgctggctgatcacagttcacaggtggctcccaaacctgtggtctacatccatcctttgtcagtgtcactgccattgtcccacaaatgtcatttgggcctagcccctgggatagtaatcagtctttacatagatatacattgtgctttacatccacagtaattctgagtggaccttaaaataaattccatgtcaggtctcaccagcccatgggttacagatggggttacctttcagccttgtaaggtgccccgtctttgagtgtagacatggactcacaacgagtccactcctgctgttcctctgctcttgctgaggcttctgctgctgctgctgctgctttgcagaggctggccagctgtggtgcctgaggcacctgtgtcttcacagcaccaacttgcatggtggccacggtgtagttggaaagggatgcttagatgggaggccaatgggagctgcttcaggaggcaaatccaagtcacagagatcgagtcaccgagagcatagtaaactcaaaatcccttcttctgcttaataactgagatgctgtcactgggttaacctcaccaagccttgttttgtcttcacttagagtgatttctgtcttagaaggctcctcatatccttctggggaaggcttctagtgagtccacagatagctggaccaggcatgtccagaaataatctgattctcacatttgagttagccagcgttcccagctatatccccattttgtgtctatataagttaccaaagcccacaaggatattaggtggctccttagtttgctttatgattatgccttgtgtgtgtgtgtgtgtgagtgtgtacgcctatgaggattccttctctcccgttcttgctatggcttctcttccccactgatgggctgtagttccctgtccttttgactttgggcttagtcatgtgacttttttgccaagggaatgtgggcagaagtaactgggagccagtcccaagctaaggccttgggaagcatggtgagcctatgccagctccctcagaactccttcccttggccatgaagagagaataacctggattgtaccttcagcccatgtcctagaatacaaacatggagaataatgaacttgactcaaaggctgaagggcagctgagcccacatgaggtcaattgaactgcagctacctacagacctgaaagtgaaataaacatgtataagtctctgacgtttggggtttgtttacatagcattattgtagcagaaacttaaataatactgggggctaaatatagtggaccagtgacagcacagaatggtaaaatggagtgattgttacttacatcacaacccttcatctctgttgatggacactaaaatcaaagtggcaattactcagagttgggagtcattgagttgcatcattgttgtttagaatcattgacagtttgagctctaagtgattacagagatggtttcctcagctacaggtaaataaacaaaggcacagagaagtaaagtgacttctagagggcttcattgatatttagcagcagaatcagagctaaacaatgagtctctcatctccagcctttctattcttgtttcctaggttgggattttgggaaatagtgcagagagattagcagtagtgacatggaacaatgtgagcctcagcttccatccctgaggctgccttcatctgccagggaaatgtctctgtgtgcagccttgccctctgcacacagtgtgtatggccacctgaataagtgtcctttcatagcgactaatggattgaaatgggtgctagagcagtgcttctaaaaactccatgtattaatcatctaggggtcttaccaaaaacgcatgcagattctgattcagtaggtctggagtggggcttgacattctgcacttgtaacacatggaccacactttgagtagcaatgtattagatcattccagtggaaacatgtatgagtgatggaatgaacagatataattaatccaggtctggtaagtgaggtactgatacatattaagttgaagtgaatttcacatcaaaaataatggttacacagtgacttttactgcccccaaattctttccttttgagtggtttcaaagtgaactgagccagccaggttaagtccctggtttagtgtgtgattagaagatttgatccagctttctcctccttctaattctttaaatatgcaatggccttctagaaacttgtctctcaggctccccatgagccacctgtcttaatatcttcccccccaggacatttcctgggtcaaggaaggaatcagggactaggaaaagtagaaaggttgcctgacagtgagaaactttttgcactcctatttgttcaattctaaaatgtgggtattgttggggcttctaattggaatctaacctgaaattcaggcatgtctagctatatatgaccaagaattaggatgagttcactagaagcctattttcaggagagcggtcagttaaattgaagtttatgggtttatggtaatgggttggggagtttacttcattagcaatagcaacgtttttgaatcagagaagtgattttgaacacactgtacatagttttctcacttagatttatctctgggtcaacccttgttggacctatattagaatcatttagtgaagaaaaggtgggtgtcattaggaaaagagccatttattcaaatgttctgtttgacattagggcactggcaagactacagaatcaatagatatttaaaaacagccaggtgcggtggctcacgcctgtaatcccagcgtgatttgggattactttgggaggctgaagcgggtggattgcctgagctcaggaattcaagaccagcctggtcaacacggtgaaaccctatctctactaaaatacaaaaaattagccgggcatggtggcaggcgcctataatcccagctacttgggaggctgaggcaggagaatcgcttgaacccaggaggcggatgttgtcatgagctgagatcgcgccattgcactcaagccagggcaagaataacaagactctgtctcacaacaaacaagcgaacatacgaaacaaacgtaacatccaaactagcaggtacatgccgtgccagtcatgacccatggtcataagatgtctacagctcaggaagcagctgcacaatgcctgcatagacaaactcttatgaaagcagaatgtcctgatgtctccataacacataacagtgtatgcttttattatggtcatactctagctgtgatgtacctacgctctaatatgccaacgatagttttctttaaatcatcaacataataaatgtcatgctgtcagtcccccacatgtagacataacttagctggtacatggataagaaacctatattagataaccttaggccaggtgtggtggctcatgcctgtaatcccagcactttggggaggccgaagcgggtggatcacgaggtcaggagatcgagaccaccctggctaacacagtgaaaccccgtctctactaaaaatacaaaaaaaaattaaccgggcatggtggcaggcacctgtggtcccagctactcaggaagctgaggcgggagaatggcgtgaacccaggaggcggaggttgcagtaagccgagatcacaccactgcactccagcctgggggacagagcgcaagatttcgtctcccaacccaaaaancnannnnaaatttgcacccaaatctgactaattccagagccaattccaatttagaatcgttatatctccctggtgaactgaagcttttatctttaaggagacacactctttatgtctaccaatgcttattgccttaaagtccactttgtcagatacagctgctttcttttaattagtttttgtgtggtatatctctttccatcctttttctttcagccttctccattcttacattttagatatatttcttttttcttttttttttgagagagagtctcactctctcgcccaggctggagtagtgcaatggcgcgatcttagctcactgcaacctccacctcctgggttcaagcaattctcctgcctcagcctcccaagtagctgggattacaggagcccaccaccaagcccagctaatttgttgtatttttagaagagatgaggtttcgccatgttggccaggctggtctcgaactcctgacctcaggtcatccacccacctcggctttcccaaagtgttggtattacaggcgcgagccaccatgcccagctgattttagctgtatctcaaaaacagcatgggttctgtttgctttccttattcagctttataatgtaaatcatttacatcaaacatctaatacaccatggactgtaaaacacagccatattttatgtatgaattaaaaaaaaaaacaccaccaattagttcctgagacacacaccttaacaatatctctgtgatgtgcataaatcaatcacatcagtttctctgcacctcaaaatttctttcctcaattctcagagatatggcaatttctctggttttacattcccagaagcaaagaaaaagtacacagcttcttcaagtcatgagtagcttcttttttatagctcttggtgtttgcaaaaaagattggaattgcttcactaatactaaattttcattctgctgctctgtttctatgacaagtcagagggcatctttttgaagacattctaaacagcaattaaactcaaaacatgtaatgacaatgacacacaaaactcaactgatgaccaaatgaagagttccagccaagttgacacaagctggctgacagagcttgtaatacacacagcttggcatatgcctcgccatttcagagatgtaaaaataggaataaatgttttcccttaaatcaatgaaatagagcatttggactgaaaatctacgacagttatagtgttttctattcattattctcattctgtttcttctcccccttgctttcttttagtttgaatattttctatcatttcatttttcttcctactagtttgaaacttatgcatttattttctattttttagcacttacctaaaattactctgtaatccatggatccttaatttatttaaaaaactaatgttaatgagtagctttattttcctcccatctaatttaaggcccacagaacaccttcacttacctcaatcctctcccaacttacatgcttttaatgtcatatatgttaataccgtatacttttaaaactttctaaaatagcattattttatagcatgagtgttcatttacatttttgcatatatttagaattttctttgctcttcgtttcttcttctatttatgactcccctctgggatcattttccttctacttgaagtacatagtttagaactgcactattcaatacagtagccactagccatgtgtagctattgaagtttaaactaagtaaaattgagtaatattaaaaactcagttccttcatctcactagccacatttcaagtgctcagcagccacatgtgactaatgactactgtacagcaaacatatagaacatttccatcatggcaaagagctctattgatagtgttcatccagagtttctgttccaggaccaaactgagggttgggctgctatttctcatggcccaataacaagatgcagatgagctggggaggaagagagtttttatttctgcaaccagttacagggagaaggcctggaaatcatcaccaggccaactcaaaattatgacgttttccagagcttatataccttctaagctatatgtctacgtgtaagtgtgcattcacctgaagacgtaagtgattaacttcttttaatctgtaactaaggtctgagtccggaagatcttcccctggagcctcagtaaatttacttaatctaaatgggtccaggtgctggggtaattacccttatcttgtcccctgctaaatcatggaggtttggggaattccctttagagcaccattaacctgtttgttgaaggcctgggaatttcctccaaacccccattaaacctgtttaatcccaaattggttccgttaaaaattccctccttaatttgtccaattttaaaggcccaaaaaaggctggggcaaactcctgaatggcctttgttacattccaacctttgtttaaaaacaccggtttttaatatttaacttaaccatttaatctctactgaaacacttgttatataaatctgcattaatgagaactggcctgcgccatatctccttctcagaatatcttagggttgtgatcccctgtgtgaagagaatatatctctggagatctcaatctctctaccccaaaaaaaatctcactcggagaaaactcagactcttatctccacagcgctatctctctcctctccgcttgtctaagatggtgctccttgttgctgtgcctgctttcatcctgggatctcccttcaccatcaggattgccttcacctcattccagtcttggatctttcttcttgtttcttgagtattttttttttttttttgctgcattcccttcagtggcctcttgggaaaagatgtgtagggagaaaaattttctttagaaacttgcatatctgacaatatatttatcctatcctgacatttggtagatagttcagctgggtacagaattctaattaattttccttcctgatttataagacattgctccattttcttctggcttccaatattgctgctgagaagtctgacaccattcaaatgcctgattttttccatgtgattgttgttttctgtctggagtgttgtaggattgcctctttatctacagtgttctgaaatttcatgacgtaggtctttcttcattcattatggtagacactcagtgggccatttaatcgggaaaaacatgtgttcttcaagttctacaaactttattacttcctttttcttgtgtctttctctggtctgttttcagccccgagtctcttagatctgtcctctaatattcctattgactttacttcattttctaagtctttatccttttgctttactttccgagagacctgcttaaccttatctcccaactcttttattgaatttcatttcttttactatatattttttactttgaatacacctctctcttcctcacattttcccccatagtattttgtcttcaattgacagttctactatcttattactctggagatattaataatagtttttaaatttttatttatttttattttcaaaacagtgtcttactctgtcactcaggctggagtgcagtggtgtgatcatggatcactgcagccttgatctctgagctcaagctatcctcctgcttcagcctcccaagtagctggaaccacaggcatgtgtcaccatacccagctaatttttttgtttttgaggtggagtctcactctgtagcccggtctggagtgcagtggtgcaatctgggctcacagcaacctctgcctcctgggtcctggttcaagcaattctcctgcctcagcctcctgagtagctgggattacagaaacacactaccatgcccagctaatttttgtatttttgtagagacaggtttcaccatgttgggcagcctgggtctgaactcctgacttgtgatctgcccacttgggctccccaaagtgttgggattacaggcgtgagccactgcacccggccactaatttttaaattgttaataaagacgaggtcttgctatgttgcccagtatggtcttgaactcgtgggcttaagtaatcttctgcctcagcctcccaaagtgttgggattacaggtgtgagccactgaatctgacattttttaaaagttttcttctctttaccaagtcttttttcccctttctgcttttttgggttgttttattttgatctctatcttgctagaaactttctgcagacgtttagtaatactagatttttgagagtgggcaactggaaagctgattggaaactctgaatacatgggtgaggcttgttggctgtgagtgtcattgcttgatgtcctggcaaggccaatgggtttgggacccctactattagtataggcctgattccctgggaaaggctcttttgatctcctgcctggaggataaaggcctggctaccagccttctgtgtgtaatgtgagggagaagggctggagtattcaacatcatgctgaatcctttcaatgatcatcttgtttttagtaatctcctaccttaactctctgtcttctgctagtatgggaaagatgacctgaaaatctaaccatttatttttcccccattaatatcattttatgattattcagaagttaaataattgtcatgctgtcctccaaaaagactgaatcaactagcaacaaataagaattttctcacagctctgccagcattttaaaagaatagctttattgagcccaggaggtcaaggctgcagtgagctgtgattacaccactctaccccagcctgggtgacagagcaaaaccctgtctcaaaaaagaaatttaaggaacagctttattgttgtaaaatagacatacaataaacagagcacatatttaaattgtgcaacttatactttgatataaccctgtgaaaacatcaccacaatcaagatagtgaatatatttatcacctcctgatacagtttagctctgtgtccccacctaagtctcatgttgaattgtaatccccaatgctgggggaggggctttgtgggaggtgattgaattgtgggggtgcacttcccccttgctgttcttgagatagtgaatgagctctcatgagctccccttcactcactctctttcctgctgccatgtgaggatgtgcttgcctcttctttgcccttctgccatgatgtgtttcctgagtcctccctaaccatgcctcctgtacagcttgcagaactgtgagtcagttaaatctcttttcttcataaattacccagtctcaggtggctctttatagcagtgtgaaaaggaactaatatacctcctaagttacctcaagcttcttcttaattccttctcctcccttccttcattgccaagcaaacaaccacctgttttctgtcactatagattagtttacattttgtgggttttttttttttttgagacaaggtctcactctgttgcccaggatggagtgcagtggtgcgatcatagctcattgcagccttgaactcctagtttcaagtggtcctcccacttcagcctcctgagtacctgggactacaggggtacaccaccacaactggcttaaaaaattttttaaataaaaatggggtcttgttatgtttctcaggctggtctcgaactcctcgcctcaagcagccctccctccttggcctcccaaattgttgggattacaggcatgagtcatgactcctggcctagtttacattttctagagttttgtataaatggaaacatacagaatgtatttttttgcggagtgggggagtgtttctatttctttctttcttttttctttttttttttttttttttgagacggagtctcgctctgtctgttgcccaggctggagtgcagtggtgcgatctcggctcaccgcaagctccacctcccgggttcaagcaattctcctgcctcagcctcctgagtagctgggactacaggcgcccgccaccacacctggctaattttttttgtatttttggtagagacggggtttcaccatgttagccaggatggtctcgatctcctgacctcgtgatctgcccgcttcggcctccctaagtgctgggattacaggcgtgagccaccgtgcccggcccaagtgtttctatttcttaaccagctttcatgcaatctttttttattttaccatctctgtgatcccactcccaaaggtactagatgtcgattggtccttaggatcagctaccatttgcccaactgctttccagccttccaaaaatttttttctttttttcttaaagatactcctgtgtgaggctcagaactcttgaattgctactgcaaatatgaactcggtgatgtgaatgccagggaattgcctgattgatcaaagaaatgtatccccttctccctcactcttgctgtcttctcatttgttttccccatccttgtggattcgtgaatttaaatatccctttaatgttataatattttaatggcgtttggcgaaaagtacagaattaggtgcaagagtgcatagctgttattttttttttggcctctgagactgttcatatatgcaagttatttaacagaaagttctgcagtgacctgagatgtcaggggggtctgatagagtacgtttgaaggcagttactggaaaaaaataatgccatttctggtttgtacttcggtaagttcagatgacccaatatattgtttacatgtggcattcagtaaaaaagtagcttcccctccctttcttcttccttttctcctttcctgcttctataaagcatctgctttgggaaacttcttaggaggagagcttgccagcccgtgggtaatggagaggtcttgcagagataaaagagatgctcccactcaatgcaggatggtgtggaggtaaatggggatacgtctggcatcactcaggaatgggccttcctggcagggaagagaagggaggggaaagaggaagggagtcaaagatgaattgctgaatacggggattccagggcctggagccaggaagagaactttgggaggtgtgaacctggagggcatcagctgatgaggagcagcctgaagtccggggaggacctgtttttggtggccaggaagaaagtgccttccacacacagggaggccacaaggctgatgggctgggggttggaaggacagccctaggacaggcttgggaagcaggctcaggtagggactgcgaggttcttgttgagtctttttcattcctggtcttagaaaatagaatccaaggcctcttgagagtggaaggtgggttgggaggagggcagatggggcttaggcccaggacacccgtagagctactgcccagctgtctctcagggactctgctgaggtcactccaaggatcattcttagccttgctagacagtactgacagagggaaccgtagtatcgcacccacttccttctctttcaatgaaagtttaaaggtcaccatttcctctggcaaaggaagttccacaaatattccatttccggtcttagaaacagcaaggtatcaagcaattgcaaacttcctgtgctggggaattcccaaggaagtaggggcagagttctggtggagacaaagtgaattccgagtgattagtcagtagcagtagcagtagcagtagcagtagcagtagcagtagcagtagcagtagcagtagcagtagcagtagcagcagcagaaccagaatttccccgcacgtgtctcaggctctcatttgccaactcagtctctaagtatttttattggcaggaaaaataaaatagctatgagtgaaataattcattagacctgagcctccatcaattttgtgtttaaaggcctgactctctttacctttccctgggatggaagatgcaaatgttcctgatgtcactgtcaaaaaagaagaaccagtgggtatattgtatgcttgagttccagccatttgtcacaatagatagagatgactgccatgtgtgtagactttctatagactgtgtgctaaacccgacctgccacttccaaggagtagatgaggaatgtccatggttctggggagccctaccccaatttggggcagacattccaaagctcattttctgtggagggggttgatggttaaaggacggcctgggagtaactcgtctgtactagggcccaggagagttacatgctgcttcccatgttattcatcattcccccatgtgaatagctatggcgtgaggtccaaggttagggcctttctaccataaatgggggaataaaattcccctaccagcctgagaagtttctgttataaagaggctttttttttgcgggggtgggggagcaagccgactaatgtgttatttccatacggtttgttttaaaatgtagatgtcatatgcaggagaggtggtgtagtgagtcacaacgggattagaaggaccagtccgaaaagcagaagagggtcaagttcagggcactgaggactactgcattcagtggcgtgaaaggcagatggctgaacaggagggggacattacattgcttgttctccttgagcctcgatttcctcatctaaaaagagggtcatttattcacagaacatttattaaacttgtgccaggcaccgtgccaggagctggactaaaaattaaatccacccctgtgagctgctctgaaggctaaaatatgaagtatgtaaaagtaaccaagtgctgtacacatgcagctattcaatgactgtgtgggcattgcggcagattttaattttcttttttatttctttctctttagtgagaggtgttggttgttattattgtcgtcgctgtaactgtctatttcacttgcttttttgttgcctccagcccattccagggctgtcatctaagacacttcttatcacctaaataaccggggaggcaaagcgctttcttaagagatggatccagaagaacaatgctggttttctgtagaaaaaggggctgtgggaagtagagataagaagggaattggccaagatgaatgtacagagccttattttttttttataacacagcaagattagatacaaaacaggacaatagcatcatctgtttttataactggaaaggacctcactttacaggtggggaagaatagagtggagaagtgaagagaatggtcacagagtcaatcagcatgtctgcgtcaaagctgggattcccaattcagggctcttactacagtgacgtatggctaatattttggcattgtttcggggaaaagctgaagccctgatggtgtacgtcactcttgagatagtctgtagtccagcagggaggaaagcaaggaagggaggtggaggcagcatttttgggtgtaacatttcgttcttgttttgtggccaaatcatagtgtgattgggacaagccactgcctttctctgagcctccactttctttttcttcttaagagggagggaatagtagagtaaaagtagtcattttatcaaacacctgctattttggagccatattgcaagtgggttgggggttgaacacttggctttattacccataggattaaatccaacctcgatactgtggcattcccaaactccagtctaatcttcttctccatcagccatgccccacgacaccctggtcatatctgatgttgccccttgcacttgccccctccttatctttgctttctgacctaccatatggctattggttgaaattctcattttccagggccttgcttaaatatcatctcatccattaaaactttcttgaacctccccttgccctgttcctccctaatgtctcaagccagaatttatttccttttgtggccaagggactgggtttgtgacctctctcacgagacttaatattgagaccaaacgtctttagacctcaccagccagagagatgagcatctatggaatgcaggcttttgcctggacttgctgatgcagggcctctgccttcctccagggcctctcctgctgttttaggaatttccctcatggcacagtccatgagctcagggtcaagttcatacatgtttttacttcttctactctgcaaatggtcttcttgaactctgagggtcctaaagctgctctgcagtttgtggggtgagtagaaaggggctttcaaaagttgtgctgttgtttcccaccccaatagcatgaaacacaaagatgcttacaaatagctgccttgctttctagtcccaacttctctctcctgaggctttaaaacaagtcccctaggttgagctggactggagttgtatcctatcttcattatctgtctactctctttctgctctctagagaagatattatatatgtgtgtatgtatgtgtaaatatataatatccatatatagaacatatattgttatatttacatatacatacataacatatgcatgtattcatatatacatatgtagtatcaaagttggaattaaactgtatattttgtaatttgcttttatttgcatctatcactgtaaaatgaatatttatccataccgtaagatattcttcaatgtattttttttttttttgaaacagggtcttgctttgttgcccaggctggagtgcaatgacccgatcttgggtcactgcagccttgacctccccggctcaagtgatcttcccaccttagccctctgagtagctgggactaaaggtgtgtgcctccacacccagctttttaattttttttgtattttttttttaaagacagggttttgccacattgcccaagctggtcttgagctcctgggtccaagcaatcctcccactttggcctcccaaagtgctaagattacaagcatgagccaccacacctggcctcaatgtaatttttaatggctgtatagtattccatcatgtggttgtacccaaaattatttaaccagtccccagtttatttcaatttttttttactattttgaataatgttttagtaaatacccacaaaatatgtacaatggctgggcttagtggctcacccctgtaatcccaacactttgggagtctgaggcaggtgggtcacctgaggtcaggagttcgagaccatcttggttaacatggtgaaaccccgtctctaccaaaaatacaaaaattagccgggtgtggtggcacacacctgtaatcgcagctacttgggaggctgaagtaggaaaatcacttgaacctaggaggcggaggttgcagtgagccgagatcacactactgtactccagcatgggcaacagtgagactccatctcaaaaaaaaaaaaaaaaaaaaaaaagtacaatttgttgtacctccctgattatttcttttaagtagaattttcttataattttttttataagtaaaattttgaatcaagggagaagcacctggagtccttcagatacctattgccaaactgaacttttctgttccaggtttactacattcagcctgactcagggtttggggagtagaggagggggtggaggcagagggcctctccctgtccccacagacctcccttggtgaggtccaagtctggacaggtggagtgtggcattgcaccgtcaggtcctgcttcctgtaattcccctaaatccatccagtggagcctcattgttcaagtcttttttttttttttttttttttaactcccctgaagacggagtctcactctgtcgcccaggctggagtgcagtggcacgatcttgactcatttcaacctctgcctcccaggttcaagtaattctcctgcctcagcctcctgagtagctggcactacaggcgtgtaccatcacgcccggctaatttttttttgtatttttagtagagacggggtttcaccatgttggccaggctggtctcgaactcctaaccttgtgatctacccgcctctgcctcccaaagtgctgggcttacaggtgtgagccaccaggcctggcctcaagtctattttttaactccaggaggcctggtattcagagggattagggctggcagaagggcctcaaagctttcaaggcctggggaataggctgcagcctggttcagggtaacccaagtgattttggttccaaagggacaggaaaaaaagtgattgatatggaagttgtcaaagtgcaactgtcaagacattaaaaaatgtaacccttttactaatatacagtagacttgtgttaaatatttaactgattgtaaaaggaaaaaaccagacgcagttttccctaccatactgtcacaacacctcaacactgagttcttctgtgacctctagtcaccgaaatgcttggggatttctcccaccactagtcctccagcagccgacaccagttgggtgtcctaattcactccaacactatctacctggagttagcgttagatcccacaggttgagggctcagtctcacaagactgcctcccacttcaggtgccagttacaagtggtaggttgtcacctatgcttctgactgatggctataaatctgggtttgcttccctcgggttccgtgaatttgctagagcagctcacagaactcaggaaaacacttaagtttaccagtttattctaaaagatattacaaaggatacagatgaacaccagatgaagagatgcgcagagcaaagcatgtgagaaggggtgtggagcttccatgcccctctggggcaccaccctccaggaaccttcatgtgtccagctatctgggagcccttccaaaccctgtcctttttgggtttttaagagtggctttattacatacacatgattgaccgaaccattggccattggtgactgacacaaccttcagcccctccactccctccagtggttggggagtggggctaacagtctcaagtctccaatcctgccttggtctttcctgtgacaaaccccatcatgaagctactgcattggggctgccagccagcagtcatctattagcatgcaaaagacactcttattattccagagattccaagggtttttaaaagctgtatgtcaggaaacaggagatgaagaacaaatatatatttcacaacatcacactcgttgggggaattgacaggatagcaaaactgattaaaggaggataggagagactgagatatatatttccatatatatatatagagagagagagagatatttccatatatatatatagatctagagagagagagagatagagagagaagagtctttccacacatttgggggagcagttccggaggtacagcccggacaggagatgtgagaagatcgtggttantgttcccctggtccagaacccctccaagtgggcttaagtaggaagggtggtgagcggcaggtaaacacacgtcaaaggcagtcttcctctctgagggaaaacacttgtataagcattgcaatcaatgggcctctttaattatgtgccagtggcaagagcgggtgctgaacccaggggcctgcctcaatccggggcctttgaggcagaataaagtggtctcaggttgttggcatttccttgcccttccacccgaagcagacacaaatcctctctggaggcaagttccccaattcagccagtacaactcccacagactaagatcaatcatgtacaagctcacagacaaaggtcaccaaacacacagagcaataaacaaattcatgagtgacgtgaatgagaataaacagaaacaataaccaccagctgggatgctctaagtcttcagctgttagaattcctgaatatagaataaaactgccacaatggcaaacatgcatctagtacttactgtgtgctgggttctaagaattttgcacattgtgccagataccgactcagcttcacactcaccctcctactgtgccctcttaatttgcactagattaaaaggtagaaaggaagaggcagctattctgttcttggctgtgcctctggcagcacatgcaaaatgggcagtaacagtggcagtcacaggtaagtagccttctcacagtgtggagttaaaggcatgggactgagacgagcaaggttcctaaagggacagtggccagtaaatgaccaggggctactggagtggctgcatggctctgtggaagctcagaggagccttgggtcctgcaggtgcagtagcagctttctgtagttcctgatctctgggtcccacaatcttccccgtttttgctcctccacttctaattttgtaactgacttccctgtgtgtacttctctctctgattgaaatagccagactggtttctgtttcctgataagacattgtctggtacgaacacagtaactcatttaatccgatatctctatgaaggaggtacaataattattcctattttacagatgaggaaacacagcagaaaaataaagtcaattgtctaaggttgcacatttagtcaagggaagggttgatataacatataattatttagaaaacatctaaggaaataaaaggcataatttaaaaataaaactaggcaggtttaaaaaaatgaagtaatctataagtaaaaaagtataattgttgaaatacatatcttagtggatgggttaaatagctgaagaaatgattaatgaactggaaggtagttctgaggaaatcagaattcagcatagatagaaaaaatgggaatttacaaaagtacacaggaattataaaagaggttaaattatagggagggtagaatgagaattaacattggtctaactggaattttggaagaagagaatagagagaatgaacaaggcaatatttaaagaggtggctgagaatttttcagaaccaacacaaactatgactttaccagtagagaaaacaatgtacactgaggaggataaataaatatactatgaacaaattgtaataataatactcaacaaagacaaagagaagatcttaaaatcagcaaaaaaagaaagtcagacttagaaagaaatgacaatggcagactactcaacaacaacaatggaaaccaaattcagtgaaacagtattttcaaaatgcatatttaatctatctttgaagaataagggtgaaaagggtgaaaattgctgccttatacaaaatatcaacattaacaaaaagtaatgaaggtaatataaaaatgttttcaaataaacaaaactgagagagtttaccaccaacaagcattcattaaatggacttttaaatgcagtttttaggaagaaggaaaacaattcctaaggaaggtctgagatgcaaaaaggaattatgaacaaagaaattgttaaaattataggtgaattaaaaaaactgcctgcataaatgataataatgacaatgatgctattaataatgagttgataaggataaagaaaaggacagaattaaaatactagaaaacaagcatgctggaaaggattcaggaattacttgaaggttaaagttctagggtccttctatccttctagaggggagtcaatatattaatttttgaccgtcacttacacagtgaaaaactttaaggataaccataaaaaaatagaaatagagagtataacttctgaaacagtcaagggaaaaatatggaataagaaaactgaccaaaaaacatctcagtcaatcaaaaaaaaaaaaaaaaagaaagaaaaggttcggaaggagaaaatcaaagcatagaaaaagcgggacaaatagaagtggaaaagaaaaaggtagaagaaacaggtccagaaatatcactgatgcactaaatcaccattaaaagatgaaaacaaatgaacaacatcaaaaaattctagtgactgtagtagtgctgatcagaataggctctaagataagatgcattattgtgagtcaacttgtgatgatgaaaggtttaattcaccagaaagacacaattataaacttgtaatcaaatagttttattttatttactttatttatttattttttttgagacaggatcttgttctgttgctcaggctggagtgcagtggcttgatctcagctcactgcagcctccacctcttgaggctcaagctttcttcctgccttagcctcatgagtagctgggtccacaggcacacaccaccaagccctgctaatttttgtattttttgtagagatggggtttcaccatgttaccaggctggtctcaaactcctgggctcaagcgatctgcccccctcggcttcccaaagtgttgggattataggcgtgagccacggtgcctggcctcaaataactatttaagtgaaacaaaactagtatggcactaatgaaaaatgtataaatccataatcgcagagggatttcaacttacttctttcgattatgtaaaggtcaaacagacaaaagacaatgacaaaacttaatgcaatgaacacttttgatttaatgaacatatattggatatgtacccaagaattagagaatacatactagttttgagtttatgcagaacatttacaaaaatttagtggaagcctaaattataaaaagttgctgtcacgtagaataacacacaaacccctgagtccggaattcaaagccctccacactctcctctacctttgcatctttatcctccaccacactgcagtgcatactctgggctactactcactgttcttgattcaaattccatgttctgtcagctcaaatcattctctctgcctggaataactacttcatacatattctgctattgaattcttgtcttagcaccccatctactccaagacgatgtccagttggggttactccctgtcccattttctttgattacactttttttttctacttccattatattattgatcacatctgtgccacagtttttgactttgtgtctgcttttactcttttctagaccctgagagctcctgaagggttgggtcatttcttttttatttgctcattcctcatggcacagtgagtgcttaataaatggctattgactgaaattaaactgtatctaaatggacatattccacttctgggccattcattctttctttctattggaaccaggagatggggaaccataacaaaggtaaggttgtgccatgtgaaagaacatggaaccttcccctgagggccaaaaaagagcagggaaaggtgcaaagacaaaatcttccatttttaaacaatgtaagaatgtggtccacctcatgctcaggtgggactttatcatgacgttatttttggggacttatagctgcatcatttaccccatatacatttacctttagtgtagggaactgaggacaggaattttgttgatgcagactcttgctaatgaggctaacacttggagaatttttatcatgcattcaagaagcttgttttacatttcttcattaatactttagttggtggtttagctttagttgtaggcttatcagatatttggagatatcttcataaacgatggctttggttttagaagagttattctgaagctactatttctggcaataatcaaacagcatggccatttgttttgtaaggcctttcctaaaatatgacggtaaaatctacgtgtggaaaaatgcttattcttctgtcctctataaatgtgaatctagtttgtcttcaaaatgaaatcaagtgattaaaatgtagttttctaagaagataaatggagcaaagcactctgtgtttcacagtgttggaaatcactcatccctcataaaactgtcccaactgatcctgactcacatgaatgaattaaaataagagttaataacatcaatttacatttttaaagacactttcccatgttttagactattggttggaaaagctggtaggtgtacaatttgtggagagttggctgtttttgtctgtcgttgtttgacgtatttcaaagccatatctaattttgttgcagaatggtctgaattctacaaaaatgttgagttgtgtagtgtggagaagtacggagccatttactgaaaggctggggggaaatgacgagaccctgagataaggcagtagtggtgcgaacagagtggaagggaggtagttgagatatgttcagagtagaatcagaatggacatagtgaacaactggatgcaggtgggggctgaggaagcaaagttgaggataattctgagacttctaggttgatccactgaagttacattattcaacaccacaaggaaactaggggaatgagaaggcatactggtttgctttggagtggaagggcagtgatgtaagaggagttaatgagttaaagtttggatatgcctgaacttcaatttgatatgtgcatctgatatacccttggggtgaccctccaggcaatggttgaacatgtgtatttcttagtaactgataggcatcacagactcacatcagtaaggaagcaacagcaaacttgattggacgatatacctggaactcagtaccctatgactggagcaagtctctgtcagtgaaatgaggataagaagaatcttgaccttgtggaatatgttgttaggaatatatgtgatgaacaacataggatacttcctacagggctccacatgtagtaagggctttataaatgcttgataaatattattgttgtaatttatttccaaagtaagatgccactggaggaatctttggaacccaaattaataacaaataggactggatgcaatggctcacacctgtaatcccagcactttggaaggccaaggcaggaggatctcttgagcccagaaattcaagaccagcctgggtgacacagggagaccttgtatctatgaagaattaaaaaaaattaaccagatgtggtggtgcacgcctatagtccctgctgcttgagaggctgaggtgggaggattgcttgagcccatgaggttgaggctgcagtgagccataattgtgccaccacactccagactgggtgacagagtgagaccctatctcaaataaataaataaataaataaataaataagtacaaaccagcaaacactaatcctttctagagattattgaactctggagggcagatctgaatggagccagcagagggacctatggagatcagcctggccctggacagcaccaggcaatggggttgctagagaggtaatggggttgaacagggtttaagccatgaggtctcaagaatccgtgaagactcagactaatttttttttttttgcatgaggattaggtgttcctaggaatttcaatgagagcagggttaatgaaggaatgcagggtaggagagctgagggaaggcatctgagagagcctggcttatgaatggctgcgtcagtatggctcacctgctttccttgtatctacttagcagatgatcccaccccaggcctccagggccaaggtcatttccacatagtcatgggcccttgagggcctggagcagtgtaaggaagacagagtcttaagaaattgcattaacagtcatggtgcttggcaagtgtcgtcatcctatgccaagcctgatctgaaggggtgcatgctcataggtagctgctgcccaagattacagcagcttcttcaatcccagatccatgctctcctatattcatttttccaggggttcctgtccttcgacagtgatgagatgcagaatgacttattgagttattctcctgatagttgccaacttttccaaatgacaatggggcatggagcttgagagtggaaatgaggccctagggatagcgtgcttaggaaaacactcccagcctgatgtaattctgggggtacaatggcattttcatcatcaagactgatgtaaagggtgactagcagtgagttgggggtgactcgcactggggctaggtttctgattctgcctaatccagacagagcagaagcactagtgggctggtagagggcctccagggcctcacttaatgtcctggaaaaacagctccagattgttggttcacgttctgaggacaagcttgggtactacaggatagagagagtggtgggagatgccgtggcctgccctgctgatgcctgccctgccattcctgcgtgtgatgtctctggggcatcttgccttccctgcccagacctgtagttcagctgagggcatgtggaggccaaatggcttcttagagtgttactttccttgaacagctctgctgggagaactggaggagctagctagtcacggtaactgcagcagtcaaaggatcgtcccggtggaggtggggtggaaaggtagagaaagagaacatatagcgttttccttggagatgtgtgggcatgtcatagaggaaatacccaattcctgagccttgagccctccaggaaaccttggaatattaggttagtcatccccaaggaagtctaagaattctggtctcacccatctcctttaattcccacaatgatcctacatgatattaaggaacacgggccagtaaccctccaagcaatggatgtggtggtgaagtttgacctcatgatggagcggaggttggtttgaaacctaagaatttaatttattgtttcaaactgttctccactcagcgttattaaagcatacataattgacacataaaaattgtatatgtctacggtgtacaatgtgatgtttcgatctatgtatacattgtgaaatgattacaacaagctaaataacatacccattcatcgtgtttcaaaggaattaaactcaagcacaaaagagaggtgctgttgaagagtagggctgctctatctaagtagtatgtctggggttgtcctggatcagggtccttttgtgctagtaataaaccagcccttctggggctgctccactttccccacattttcttctggagcctccctaagaattaggacatggccactttctctgcataggcttcctacttcaacaaggacagggcttgtgctgccccatgccacttgagtgtccctacagcacagagctgagtgcacactggctgagtgaggaaatcccccagattaatcttggttctaagcatcatggctgtatttcacacgtatatgaattacaaattacagcatagtcgaataaggatttttgtgctacaactggaatcccagattatgcaaattggatagtataatattgaaattcctaggactttttattagttttaaaaaattatacaagcttagagtaagaaattaaacagtgcaaaagaattcactgtgaaaagtaaaatgctctgtctctgctgagagacagatattgcagcccagatactactggggtcaatagtttcctttaagcatgccattttgatggtttatgggacttacagctcaagaagcttgacactagggttgatctcagaaaatcattgttgcaggtattagatatgaccgtctcataaagatacacacacagacacagcgattggagatattcactggggcttatgggctgcttgtcctttctgctctgtgcctaagttgggctcagagtagcctggcatcggctgtggggagaatgctggcatggggttagcaggagcccacttaacatgtcctaagccacctggaagagtccttcaaggagaccagactccagaggccctaaggaaggaaggacttttgcccgtttttaggtattctagtcccagagtttagggaggaatggtttggctttgggtcgtgtgcccctttaccgagtgggatgggatgtgcccatgagctgttgagctggctcttggagaagacagcaaaagcgggaataagaggtcaggaagctgtgtggttgtaggaaatcccagcagagggcctgggggtcaaaagtggtcatggtagtgacggtggaggctgaggtggtagaaaatcagaggacaaaccccatgggctgctggtgatctgaccgagctcctatgctctcctggttcattttaggctctgtagcagcagatgattggctggtgtgagagcagtgcacctgccatatcaggcaatccaagacaagtccaagctacgctgggaggaaacctgaaggcagcagcaggtagactggctgaagacagacaggcaggcaacttgtcaatcagatttgtgtttttaaggacttttaactggggagccctccatgacagatcagatgagagaggaatctgggtccgcccatgtgtcaagctaccagagggtcccatcggtgcttggatcttctttgaagctgggtctgaggtttgcaggtagagggtgagctggtcagagggacctattgcagagctaaccaacaccttcccaggaatgcaagcacaagcaccccaccgcgggcaggcgggcaggcacttctccttttgccaccaggacctcacagaggctgatctggctctgtgaggtgggaaaatgggttgtacttagtacatagagataaaaggcttaggaggcccctccatcctgtgaccctgtccccagaccacaggtgccggcaggtgctgctatttcaaggctgggcctcagtgcaagcttgtggtttcttgcccacctgtgatgtcctcccactaatgaaggggctctccatcctctgtctgcctctagcaagtggaggctctgggccctgggcaagacacagggggaaatgccatctgttatccaaatatatttcaatgtgacaggaaagctgtctttagagcacagcgcatgtgctctacattgatcccaggagtttgagacaacattgcaagactgggcaacaagcaagactctgtctctacaaaaaataaaaaaaattagttgggcatggtggtacatgcctgtggtcccagctactcctaagttgaagagggagaattgcttgaggccaggagttcaaggctgcagtgagctatgatcacaccactgcactctancctgggtgacagagcaagaccctgtctctaaaataataatcgtaatacattttttttaaagtaaaacaaaaaaaggtcacactttctcataccaaaataaattccaaataaattaaaggcttaaacatgagaaagttaaaccataaaattactagaagaaaataaaagcaaatatttagataatcctggggataaatttctttggaatgaatttccttaagatgaatctctaaaagtgaaattcagggttcaaaggtcttttctttgtccttttcttttccctttccctctccctttttctttctttctctttctttctttctttctttctttctttctttctttctttatctttcttccttccttccttccttccttccttcctttcctgcttgcttgctttctttctttccttccttccttctttctctccctttctttctctttctttctctttctttctttctttctttctttctttctttctttctttctttctttctactttctttcttctctttccttccttccatctttctttctttctttctttcttttctttctctctttctctctctctctctctctttctttttttttctggtgagacagggtctcattctgtcactcagactggagaacagtcgcatgaacatggctcacagcagccttgacctcctgggttcaagcaattctcctgcctcagtctctcaagtagctgagaccacaggcacccaccaccaaacctggctaatttttgtatttttagtagagatggggtttcaccacattggccaggctggtcttgaactcctgacctcaggtgatctgcctgccttggccttctgaagtgctgggattacaggctgggcctctacgcccggccgagactacctctcttttaactggatctctgagctctgggcagagcccaccctgaatcctggtctccaaaaagggaaaattattaggaggctagaccatatgatgcttttacagtgcacttaaaaaaaagtttgttttttttttaaaagacatttctacatgtctaaactacaatcttccttgaaaacccaagagtagcttctgttgcaatagctagtcaaaaatataatagtcaaaaaaatcaggtaacacaacacaaacgcaagcagtttaagagctgaaatgaacttgtctgtttacactctagggattccataaggaaaaatagaagtttctccctaaaagggagcctggcaccttctccattttctttaaggaaccccaggctattataaactattttagggctctcatgcagcagacggtgcaagagaaaggagagacagcagaagtaaatgaagaaaacagaatccagtcaacagagaagaaaaaaacttttgctcaaaaaaaggcaagttcctaggaaagaaaaaaaaaacatgagggctatttaaatacaaagacgcatacatacacatgcacacatcttggatgttagcttttaattaagctgacttttaactattgaggtcctttaaaataaatcttttaaaatcttattacgatatttcagctaggacaaattgctgctatttcagcattaccaagtatcaaaccagaaaaggcttgatttaggaaccaaacccaggctgtcgtggtaggaaaaaaggcagaacgttagctatggaacccacagcatggggcaacagccattgctctttcagtatggcctggctagcaaaaaggtggccttgttatgtaaataaagcccgtttggtggtcaaaatgaaacatcttttcctttttttttttcttttgctggccgttttttcccccaccataccacgtttgtgtgtgtgggagggtgggaatttagccacttcagaggcctcattccccataatttggaaatttcctttggatttgatcaagtcagatagagtaggtcaaacccaatgggaaaaagactgaaacagcaataaaaacagaaacaaacagttaagcaaaatgaatgatcacacaacttatatgattactgagtgctctaatggtaaggagaaattaagaccagctggttgttaaactttagccaagacaaaaccccaattcagctacttacctagggttgggtctcaggctgaagaccgctcactaccgttctagaagcaagaaataaaacttgaactcgtcttacctgtgtagcaggacaagccgcagacaaaatccctcagacaccaaattaaagaaggaagggctttattgggcctggagctgcggcaagactcacgtctccaacaaccgagctccccgagtgtgcaattcctgtcccttttaagggctcacaactctaaggcggtccacatgagagagtcgtgatagattgagcaagcagggggtatgtgactgggggctgcatgcacctgtagttagaatggaacagaacatgacagggatcttcacagtgcttttcttatgcaaataaccgattagatcaggggtcgatctttaccaggcccagggtgtgtcaccgggctgtctgcttgtggatttcatttctgccttttagttattacttctttctttggaggcagaaattgggcataagacaatatgaggggtggtctcctctcttacctgcggggagtgagctcaaactccttaaaggagttacctgccttccatcatcagggaagcaggaaatcttgccttccttgttggaagcaagtaaaactcaaaacaaacaaagaaaaaaacagggagttgtacagcaaaataaacttttgattttgaccaaattttgggagatcaggaattctctgaaggagatgctttcagacctcagcaaattgtcctgttggtttgagccataaagttagctcatgctggtaccaaacaccagtaggagatttgtcaaaggtaagaggcatctccactcagaatcccttcgtggttaccaacatgtgaaccttggaaatctgagacaggtctcagttaatttagaaagtttattttgccacggttgaggacacccacccatgacagagcatcaggaggtcctgaccacatgtgctcagggtggtctgagcacagcttggttttacacattttagggagacatgagacatcagtgaatatatgtaagatgtacactggttccctccagaaaggcagaacaacttgaagcagggagggagcttccaggtcacaggtaggtgagagacaaacaattgcattcttctgagtgtctgattagcctttccaaaggaggcaatcagatatgcatttatcacagtgagcagaggggtgactttgaatagaatgggaggcaggtttgccctaagcagttcccagcttgacttttccctttagcttagtgatttggaggccccaagatttattttccttctacatcactgtgggcagctgactaggaaagctttgtaggactggtgggcagtgtgagagcccagtggggggtggtggtcctgtgccaatggtagcaaccacctgtgaggctgagtaaactcatttcccaacctcctctagcagccccagtggagatacagatgaagcagactagcgatacaacccagcctgaagttttgtctggtgagtgtaatggaataaaaatgggaagggtgctgaagagaccagcaagaaaatggttgaagagatggggcacagaaattaagctggatcaaaaaggacggaaaagcagaaagggccgatagagagaggggatatctatgggttcgcgattctgaaaaggacaaatcactggtgctttgagaagagagagggtgagaaagcaggaaggctggaggctgtcatccaagaggcggacatctgtgaacatgattccaagagtcaccagaccatgggggtggccaaagggagtgcctcttctcacctcctactcttaattccttgtactcaagataataagttcccagaagagaagtacccatatttaattcatctgtgtcttcctagcagtactaaaaatattatatgaaaggtatcaaacctttgagaatgtgtgctgctaaattgttaaggatgctggaaaactcaagacgtccctgatcctgagcctgagtatgagcctgtggtgagcccaatgcaggtctccattcagacaaaggcctcagggaacggatgagacctagggacagagatgcatgctggagcagcattccccatccctactgcagctcaggccagctgactgctttatgagtaaacgttaccagggaacactttgcagtcttaacacacatgcccacctgtgaccactgatccctgttgggtgaccactgacatcagagattcgatggcagcaatgaagacaaggctatcctcattaggaaggaaaggaaggaggagggaggagggcaaacgaatctttcctgcttgtcaaccacgtccatctctgttaggtgatttcccatgtgtgactttgtttatctttataataactctgagaggtaggtcttgatgtccacattttgaacatgaggacatccagccaggaagttgagttctggggacatagctgagagggcaaagctacatataaacccctctttgttttttctggcttatccactgagtgccccctgcaatccaccagcccatttgtgaagtgcatactataggtaagttggcacaggaggagtggatgtgggcgattttgtcacagctctccaggaacttacacactggtgaggagggccaggtatgttcctgaccagtcacaatcaaagcaacctcctactaatcagggaggcttggtacctggggaatgctatgttgaaaggttcttttctgggttttaaaatgatgggtctatttccttattcttaagattgctttttttctggctagaacttaaaagaaattttcagtaaaatttcccttccctggcacaaagtgagcttgaaatgaattcccaggtggccttgatactttaaaatattgcctcctataaaatcaacctttagaagaaggaagtcaaagaacatgctagatttcacaaaggttaattccttgaaatccagttatctacaggacaatgttgtcaaagaaaaaattatttggccaggcacggcggctcatgcctataatcccagcactttgggaggctgaggcaggtggatcacctgaggtcaggagttcgagaccagcctggccaacatggtgaaaccccatctctactaaaaatacaaaaaaaattagccaggtgtggtggtgggcacctgtaatcccagctacacgggaggctgaggcaggagaatcgcttgaacccgggaggaggaagttgcagtgagccaagttcaagccactgcaccccagcctgggcaacagagcaagactttgtctccaaaaaaaaaaaaaattcaatgatatttttaaattcatggtaaggaagatttcattcagaaccagcacagaagatataggaaacactgcaatgggactttgcggtgggggagagagattgaacacaactacatatacagcacgggcaaggacatattcatagccaggaagcagagcaaagatcagtggatgcgaaattactaagaggaaacatgaaaaataagggagcttctgcctaaacccacctaaccggatccttgctgaagacaggacagggtgattggacaccactttggggatggtggaggatggggaatccagtgagatttcaagggtgatcagatattgaacatagaaggttcttgctaaaaaaggagtttacaagaaagtgtacaaatgtgcctgggagaaggttcaggagcctgactaaaatttggtcaagcagagaatatttgccaagataatagctaagtcttctgacaaacaatagatgctaagccagcaagggtgatgtgctcagagaaagcactgagggcttatttccttttcccccaatctccactcagtcaagtctagtccccttgtcaatgtagccatttgtaagaatgcaatcaggcagggtcccatctcctagtgacaggactgactgaagttctgctgaagagagtggcctggggctgacaccgagatttcagagtcctgggtttcgccgagagctcagtgtagtgccatgccctctctccacctgaacgcccagtgtgggcaggaacaactgcagctagaagtctggcacttacgctggggtctaagacctgcctgatctgctaactagtcttgtcccttggctataaactgacgttggcacctggccagaaagatgagcaagagatctctgacacacctttaagtccctgtggagtaggattatgttggggaaggtcattctcttgactgagcagcaatttcagaaggaagtcccatgccgaagtgagagaaggcagggaatcctgcctagtcagctagagcaaaacagtctgcaggacgggacccagggatgtgatcctcccatccaaaggcactgaactaaatgactaaaatactttccagggctcacgttctttgaagaatggggactaaaactaagacaggagccagcaagtgaggacttggaaggagatggctcatctgatcagcctccactcaacaattttaatcatccacactggcatggggacacaatatgaataagttgacagggacctactctgattaagcagtgggctagtgcagagacctgtcagtcaagagtggacaggagatgatttcagacagtgagaacaaaattaacagagtcatgtgctaaagggtggctggaactacagaggagtttaagactcaagaggtctggctgggcgcggtggctcatgcctgtaatcccagcactttgggaggccgaggcgggcggatcacaaggtgaggagatcaagaccatcctggctaacgcagtgaaaccccatctctactaaaaatacaaaatattagccaggcgtggtggcgggcacctgtagtcccagctactcgggaggctgaggcaagagaatggcgtgaacccgggaggcagagcttgcagtgagccaagattgcgccactgccctccagcctgggcgacagagcgagactccgtctcaaaaaaaaaaaaaagacttgagggagttgtttatttttgttttctttttaagacagggtctttgttgggcgcggtagctcacgcctgtagtcccagcactttggaaggctgaggtggaaagatctcttgagcccaggagtttgaggccactctgggcaacatagcaagacaccgtctctacaaaaaatgtgcaggttgaggctgcagtgagcagaaaaacaccgctgcactctagcctggatgacagagcgagaccctgtctcggaaaaaaaaagaaaaaagacagggtctcgctgtgtcacacaggctggaatgcaatggtgcaatcatggttcactacagcctggaactcctgagctcaagcaattctcctaccttggcctaccaaagttctaggactacaggtgtgagccaccacacgtggcctcaggagagatcttaataataaaaggacaaattgccttgcatcccttaggggcaggattgacacatccaaggatcaggcagaaagcctgtgcggagtgggatgagcaaagagaaaggctgagagttgtgaagagggagatgcagtgccagctaggacaggcctttttgggctatgggaggttttcagaggagaccccacctaaactaacccataacattgcagtggggacctgttgaagtcatggactactacctgaaagccagagaaatgggaggagcctttcctctgaggagggactctagtccataggtatcttgccaccaaatacatggacaggccctgggggaagatggtggtagcccagctggaggaaaaccatttgccacctgaactagcccagggtaagccacccaggcactgagggtgcacacccatgcatgcacacacagaatcacactccttcctattattcctcaattcaggggtctcaacacccattttttttgtttttggggttttttttacatgtttacattttatttatttattattttgtgacagggtcccactctgttgcccaggctggagcacagtgcagtcgtgcaatcatattagattggtgcaaaagtaatcacggtttttgtcattaaaagttttgccattacttttaatgataaaaaccacgattacttttgacgcaacttaaaagctcactgcagcctcaaaattcctggtctcagggaatcctcctgcctcagcttcctgaatagctgggactacaggcacatgcaatcctacctggctaattttttaaaaattttttttgtaaagatagaaactcattttgttgtccaggctggtttcaaactcttgtctttgtgcctccctctgccctgtgcaagaccttctggatgcccactaatgaagacttccagggagaggaaaagtaaacataggtccctgatcaagggaccagggtttatcgaccacaaacagcatgcccagattccactggcagtcctagaggtcgcatttgccccaagtgtgtgtggaaggcctctccctagcagttggtttatacaccagccacagcacagcatattctcttaaattgtgaacatttgcaaaaactccttgaggacaactatcatgtcttgtgtacttttgttttgtttcccttcccctatgtacacgcgcgcgcatgcactcatgcacgcacgcgcgcgcgcacacacacacacacacccctcaaactgaatgcctggtgtgctgaatggatgaatggctaatgtaagtcattctaaaagctactttctttggcataccatcacctttgatttcatctttctggaactcctatgttcccagatgaatttggaaagccctcaggaaacatttcaaaattgctatatgggagaaatgggagggtctctctagaaatttacctgccacaggtatttctggtaagacacagcaaaggtggcaccacccattcctcgttacaatgtcaatgccagtcaccttcctgtcccataaaactttattaaaggtgcagaattcccatggaagcaggtggacaccatctgcttccagccagccaggggagcaaggtgtccactgtgcctttgtggcaggaactgcgcttctctactctcccactttgaggcctctggggctggcctgctgcctcctcattgacaaggctgcttactgagcagttcattctgagctggacatagtgcttctggtgagtctctacttctatttaacccaaagatattctttcctaaggaaacgctttcctgtcgggggaggttagctccagatggaagtcacaagtgatggcatggtagctctcatccgtttgggtggatgatattcacggagcaccaccatgagccagtcatggaggtgaacagtatatgccagccctgaatcaggtgcattgacagcaagggagacaagcaaacaaagctgaggtttgctgaggatgttcaagactcacacagcacagaggagcatccaccacccagcttgggaaaggacttgttatagagggggtgaagcatgagctgagtcttgaaagactagaaattagccaaactacaaggaggagaaggagtttccagtcaggaagaacaggttatgcaaaagcacagagactagaaagaatatcacattcaaggaactgcaaatagacaggaaagattgatgcgtgggataggagaggagggcaggggattccaggtgggccctgcttgccacactcaggagcttgaacttatccacaaaggaggtgtggaaccagtaatgaatgggttttgtgcaagggcttcatgtcaccagatttgctttttggagatacttctgtggctgatatgtgaggaagggatggaggaagtttccgtggcaatcaggaaaaccaattagcagatgattcaaatggcctaggggaaaagggaggaggacttggactaccatgcagcagcagaaatggagagaaataacagatcccaggcactcaggaagcgctcagaatgagcccttcaaagaacttatggtaggtgatggatggatggagtgtgagtcctgggatagcattgcctgggaaaatactttctagttgagacagggaagtgggccagcagaaatggagggcttcttctttttgctttaaatacttttataatatttggaactttgaaaatgagcagatatattagcaaaaagcctaaaagggatatttttgaaatcactgctagttctaacatataactttcagcttgcacacatcatcaattaactttgatagcgcctttctgaaactatcatcccaaatagcaatccttgtaaaaacctattttgaaaaacgggccttgtaggatagcctcacagatgttttgtggtagattttctaacattctaatgtcagggagtgaaaggaatcccgttagaagttggaaaattctggaatctctattcatggtattaaagttttgccgtcacacaaaagtttaacacctttacacaatcagacttcctcattttacattgctcggtaattagaggaaatcagtcacccagagcctgggtcctagacttgacaaaatgcacccaacaaatcctgagtggccttgctgaggacttctcccagaagatagaaaactcagttccagccaacaagggggaagcagctgaagaagtgaaattaacaaagtcctggaaggaaatgaccaaatcatctttgattgtgtaataaccagagagtagaatacagctacgacagacattttgggagagaagcattttatcatagcttttagaagagaatatttttcagcatcataagcacacaattccaagacagatactttcaagggattgttttgacgatgttnnggttttgggaccccattcaaacttcatgttgaattttaatcttcaatgttgagcgaggtcctgtgggagggtgattggatcatgggggtgggttctcccttgctgttctcaatgatagtgagtgagttctcacaagacctggttatttgaaagtgtgtagcacctctccccttcattctctcactcgtcactgctccgccatagtaagatgtgtgtgtttcccctttgccttccgccatgattgtaagtttcctgaagcctcccagctatgcttcctgtacagcctgtagaactgtgaatcagttagacctcttttcttcataaattacccagtctcaggtcattctttatagcagtgtgagagtggatgaatatagtgccatatgtttgtattcccagctacccaggaggctgaggtaagaggattgcttgagcctgggagtttaaggctgcagtgagccatgactgtaccactgctctccagcctgggtgacagcgagaccttgtttccaaaaaaaaaaaacccaaactgtgtaaaatgtgttcataaaagtgtcttgctcccacacctgtccctatatatcttattcctcagcctccgacaactactttattcatttcttatgtatcttccagaatcaaaaaaaaaaaatcaaatacaagcacagtggaatgtattgcccttcttcccctcccttttgttacatcagagttagcatatcataaatacggtctgcattttcttctttttcagctatcagcatgttttggagaggatttcatattcgtgcagacagcatgtattagtcagtccttgcattgctataaggaaatacctgagactgcataatttataaagaaaagaggtttaattggctcacagcttcgcaggctgttccacaggaagcatggcagcatctgcttctggggaggccttaggaagcttttactcatgcagaagacaaagcgggagtggatgtcttatatggcaggagcaggactgagagagagagagagagagagaaaggatgccacatacttttaaacaaccagatcttgtgggaactctgtcacgagaacagcaccaaagggatagtgctaaaccattcataagaactccacccccatgatccaatcaccccacaccaggccccacctccaacatcggggattacaatttgacatgagatttgggctgggacacagaaccaaacaataccagagtgctttctcattcttttctatagctgcctagtattctatgtcctttacttcatttaggcagtctcttgttgatagacacttgggttacttccaatttttcctattacaaatgatgtgcaatgaataattttgatcattttccatttcacatgggttatgtccatctgtgggataaatctccaggagtgaaattgctggatcaaaggggaagtgcacttgtgattttcatagttagcaaattttgttctataagggtcatatcaatttatagtcccacgcgtaatatttaacagtggggatttcccgacagtttgaccaacaaggtctgttgttaaacttttgatttttgtcaatctgatgggaaaatactagtatctcaaagtgcttttaatttgactttcttattacaatgttaagcatcattttactctgcccaagatcaaatagtattttcttttctgtgaacagactgttaagatcccttgcctcttgttttgctggatttttgttcttttttttcaaatgttttgaggcagttctttacatgtgaaacaagttatctctttatctggggtgtgagttacaactacttttcctctggcttgttttgcgctttgactttgcttctggtgattcccgcaattctgaaagtgtactttttgcatcattcattcttatacacccatgctcttgttcacgctggttcctctacctgagggctttttcttttcttttctatctgggaacattttttagagacagggtctcactctgtcatccacgctggagtgcaatggtgcgatcacagctcactgcagtcttgaacttctgggctcaagcaatcctccagtgtcagcttcccaagtagctaggactacaggtgcatgccagcatgcctggctgattgttttatttatttatttattttttgtagagatgggagtctcactatgttgcccaggctggtcttgaactcctgggctcaagcgatctttctgcccctgccacccaaagtgctgggattacaggcgtaagccaccatgcccagcccatgtgtggaaatcttctgtttatccctttaggcttgattcttatgtcgttctcctccctccttcctggctactcctcttgttctttatcttactctacttgtcatgttaccttgtttctgcttataactagctgcctctcctatctgaggagggacttgtgactgttctcatctctgtactcccaggtcctagtacatagcgcttgctcaacagatgtttggtgcattgatagataaatcaatggtagctgttaataccagtcctgactccctgcagtgcttcagctgatcctgttccagatgtgcactgaatatctttctgttgaacaacagaaataaaggggatgggtgaggaggatagtcttcggtggccaaggatatttgtaggtactttgcagcactcagcaatgaggagtgggctttagtcccccaagaactctcacagccctgtttgtctttactgttcagtgtcaaatccaagacaagtcaatgatcaggaaagacctttttttttcttcagtgaagtttatttcagaaccattgaacagtatgatatttgctcatttataaatattcccatttaaataatctgagcttatatattttcagtcttaattaaaggacttgatttaaagagagcacaccagtccaaattgaattgattccatagctattaaaaactaggctcttttacagacactgctacttcttgccccctttgaataaattagaccaatgaataaaacaaacaaacaaataaataaataaatagggaagcggttgctcatcagaatgtgggagcgaatgacagagggtttcttagaaccaaatgtggccgtggtttctgtcaggcgggctttaagtgagtaggagaggtgagagaggcctggctcaacaaaagggctggggattggccctgaaaggagagagctgactgtcctggctgatggacaggagatcctcttagcactaccctaaggcaggcagttgggcattggtgtagacaacaggaaagtccaggctatagccgtactcaaaaacctttctgttccctttctgccagccctagggattgagtccacattcagcacaggactctctgggtacagctctctttaggaagacacaaattgcatggtgaagtcagttatatcctggccgcctttggtccctcccaggaagacgggcatgttttctgcttgagaggtgctgatgtaccagttggggaactgggcagactcaaattccagcttgttattgatttctatcttgttgaagacaaatcgcttttccatcttcttctttgggtaatttttgggatctacactctgcagcgaaagagaaagaagaatttttgtggggcaagggacaaaaatgctatgggaaagatgttctttgggttggccagaaaggaaactgacgagcaggtcacatgatcaggagccacactcctgagttgtaactgggcccccaactttctgtgtgattattaaaagagcccttcttcttttctaaaacttagtgccaaatgctgaggagcataatgtaggtgagaattttttttttttgggggggtgaaaattaagctagagcttcttgaagtacctagtttccaggggctttttattgtatttttccttatggtcctagaatgacatcaacttggaaatgaagcttttgctgagaaagctggaggtgatagtggtggtgattttgggagtggagtggacgtgataatgggaccctttaagtcatctatttcccaaggtgtctatcaaatgagagcagccctaacaatatataatctgttggggttgtaactatggtaggacataataacatcggcaaaatgatttaattttctgcagcaggattgaaggttgcacgcagttaaaaattatgttaaatttatttacattaatgcaaaattgtcaaatagacctgttcccagcttttcctagggatgggggcggggagaaggtggttgtctgggaataagtggtagcaggaggctgagaagggcttcattccatagcattcacttacctccagctgtagagtgggcttatcatctttcaacacgcaggacaggtacagattcttttccttgaggcccaaggccacaggtattttgtcattactttcttctccttgtacaaaggacatggagaacaccactgaagaaagaagggggtcttgtggttagggacacagcagtgcagggtcaccccaacccctaggccccatgagtaggatacatgtaatttggtagcctctgtgggaacccacagtgaggttccttggcctaagacacaggataacttgacttctcacagacaatagcagggtcattttgttgatttagggtttcccctcaaaggcctgagggtttctcagagcctcatagcagtaggaacggagaatgaaagagggtctacattttaaatgctgaaggaaggaaggaaggaagccattgtgtcactggctggcaatgtgcccatccacaggagcggaacaacttgatcaatgtggaaggaaaggaaagaggtgaggctgtacttctgccagaaatcaggcaccagaactgtttcaggaacagagagtagcccatgggaagaaactgggagaggagaggctgagctgggaaagtggctccaaagagagacactcattttgatcttcctcagtcacagcagtgtcaattggaaggccctgggatcactcttactacccgattccaaagaaacaggattttcttggcctggctgagagcaaatagcttcccccttgagtgaggctgtccttcaaagtcagcagccttagttgcccacactcctgtgcagaggctttggctactgtggcacgatgccaggcagatcaccacagctaatgatgggttcaccgcacttgaaacttttgcccgttacagcggagagatataagttcctgctgggcggtaaaatttccctacaaggaaccacctggcattgggtgggacggatgttggggcaaggggggaagactggggagggggatggacacattatcgctccagcactcttgtttcagcctcaacaacaggaagagagaacccacaggcagttaggccatgtccatcaaatgaccccatattgtggaagaattgacattgcactatgcccaagagacttgggtggacatggtcctgggagtgcttgagccgtctaatttctcagggtcacactcctgttaacaaatgcactggccagtgcaatcaaatgtgccatttctaggaccaaagtttgtatattcctttttaatattttttttcacttgtgttgatcatttgccttaaattaactttctactttgtttaaaacatggagaattagcaagctgccaggaagccaggcagggaaaccaggatgtttccatttaccttgttgctccatatcctgtccctggaggtggagagctttcagttcatatggaccagacatcaccaagcttttttgctgtgagtcccggagcgtgcagttcagtgatcgtacaggtgcatcgtgcacataagcctcgttatcccatgtgtcgaagaagataggttctgaaatgtggagcacatgttgtttaggtataaaatcagaagggcaggcctcgtgaggcaaggtggcaaaatttgatttcttggaggacacctgagcatatacggtcaaagtctgatgacaacaccagtagggatgaagctgggagtggggtggctaagaacactggacctgacactattagacatgggttccagcttcaggtctattactgctcactgtggccgagcaacagagctacttaggtaaaatggtgatggtcataacactagcccacagggaggttacgaacctctggtgacaatgtaagtgaaaggcccctgagaaagagtgagggagttgcaaatgtcagtagccatcaagatcttctttaagaatagtttccactaaagagatgattgctttggtttccagccttctttgttttgtctccccgctgggccttctacctttaaagggctttggctctgggggaattgagttggctggggcttgatgacttccaagaggacacaagtggagatctactgcctgctcttggctaactaccttcttcaaagatgaagggaaagaaggtgctcaggtcattctcctggaaggtctgtgggcagggaaccagcatcttcctcagcttgtccatggccacaacaactgacgcggcctgcctgaagcccttgctgtagtggtggtcggagattcgtagctggatgccgccatccagagggcagaggtccaggtcctggaaggagcactgcggagagagcgagggagggagcctggtgaggtggtcctgccaggaaccatgctttgacatcagagagtagaaagctcagagaggaggaaagggcttgaaagaatcccgagcttctaaagatcatccctctctgggccaggcgtggtggctcatgcctgtaatcccagcactttgggaagccgaggtggatgaatcatttaggtcaggacttcaaaaccagcctggccaacatggcgaaaccccttctctactaaaaatacaaaaattagctgggtgtggtggggtgcacctgtaatcctagctattcaggagactgaggaaggagaatcgcttgaactcaggaggtggaggatgcagtaagccaagattgtaccactgcactccagcctgggcaacagagtgagactctgtctcataaaacaaaacaaaacaaaacaaaacaaaataaaataaaataaaataaaaagattatccctctctgaagctcaaggaggttaagggtgtactcaagggcacacagcaggttagaggcagactcaagactagaatgtgggctttctgacaccttacaggctattcttttagaataaatcccatttctactttgttcatcttttttgtacatgccccacctacaccatacatgtataccttctctatatctttttgtatccctaatgctgtcacactatgatttgctttttcatgcagatgaccataacattttccattcacctatgctcactcagcaagtattcaatttttctacactgttcttttttttcctttttcataacactgtctcataggcattctgcaaatcctgtgagagtactttttgtgaaatgttaccactttcctcttattcagagaagctccgtattaaggcttcactgaggttgccttaaggcatgataatggttcaaaggcttgaaagacagttaaagagacctgtaagtgcacaaaagaaagttgagcaggagagaatttcttgcctggagcagagccaagctactggaagaggcaatgggggcaaaggccaggcagacaagccaatgggctcctcccacagctgcagccaacaagttatgccagtcttaaaacttctaaagaaatatgtttttaacaagattgaggactggattatgaggctaggggaggctatcacaaactggaataaaataaagccagagaaaagtggctgccttccaacctgcacaactgacctagctaggctgatggctgggccacctaggaaggctactgagcatcatataaaacagaagggacagcaggaatataacatggctctttgtaaggatgagtctgaaaaatgaccatttgctgcccaaatgcccttagctacaactgaaaatatttcagaactggaggttgcaggatgctggaatctcagagatcatccagctcagccctttatttttcagatgaggtccaaagcgggtaaaatgacttgtcaaggtcaaacagcaagtgaatggttttctttcaagtctcaattcatctttttgtttatatcatctatgtcttgttgttataagcttcaccccaggtagcaaaaaactattctactcaaaaggggtagacatatgttagttctcaagatcatctcttggtttcagagtttaactcaagtgattggcataggctgaatccatctcttaaaaggataatcaaatttatgttgaagacttggttgtcttcctactatgaaatgggaaacattatcactactcctcccctgtcaccaccaagtgtggccaccaccaccaacgttagtgagtgactgtggtgatatgatgaccaagtggccaggtcagcaagtggtgcagcctgtgtctcactggaagaggttaaagtctttctaaaacaaaataccatggcatcaaagtggcccagaactcccttctttgagctttccctgtgttagagcccttccttgggttgggagttaaacccatagtcttaccttcatctgtttagggccatcagcttcaaagaacaagtcatcctcattgccactgtaataaaaacagggacatgtctcaattatgtcttctaaacaggtttatttttccttccctgtgtacaagacttgactgttcataagaaactgcaaacagcctgcctctcaaagctgcctgaaacacctggcaagtttcacagtgatatgcgcagaacagtccagaaggcagattctaggcctggcaggtgggcaccctgggtgctccctgttggatcttgaggcctaacctctagcccagcagagtcagctaaaatctgagctctccctctccctccaagccacactttgcaaagggattccttgtattgtgggcttggaatcttttctccccatttgcctctgcaggaagcccttgcaacaacacatctggatagcctccaggtcccaaggctggagggacttgtaatgggaaagtagtctttaaatcagatttacttggcaccctgtttgccactgaaagaggcaatttaggggaaaaatctggtctccaagcacagataacactctactcttgaaagaggagacctgctcatgttactggtctcagcgtctccactgacctgtaataagccatcatttcactggcgagctcaggtacttctgccatggctgcttcagacacctgtgtaaaaaggagaaaatgagtgacttccccatgacggctacgttcatgtgtgatttctctcagcatccagtgcatggcagtcatgcaaagaaatgatctctgagtaaatgaatgaatgtgtgaaagagaagtcctttgggtctagagaaaagcatttgctaaaccaaaccccaactagcaatgtattggctaggagagctggagcagaggctttgacactaacctttagggtgtcagctgttagataagcagtatccattcccagaatatttcccgagtcataagcattatattacacctggcatttttgcaaaaagctgagagagggaggcagagagggaaggagagggagagacagagaaagaaagagagagagagagagaatatgcatacacacaaagaggcagagagacagagagactcccttagcacctagttgtaaggaagattaaagtcatacttgagcaatgaagattggctgaagagaatcccagagcagcctgttgtgccttgtgcctcgaagaggtttggtatctgccagtttctccctcgctgtttttatagctttcaaaagcagaagtaggaggctgagaaatttctctgttgaatacctgatttcacaatcaagttaaaggaaaggggaaaagagtattggtggaagcttcttaggggaggggactaataaactgagataattctctggttcatggaagggcaaggagtagcaaactatgacacattttgcaaatgtatcaccatgcaaatatgcattgttttcctgacaatcgttgtgcagttgatgtccacattaaaatactggattttcccacgttagaagaatgtttaaatttagtatatgtgggacaaagtggaagacacacagatttatacatgcacatacttttcttcattcacttctttgtacttaagtttaggaatcttcccacttacagatggataaatgggtacaatgaagggccaatagccctccctgtctgtattgagggtgtgggtctctaccttgggtgctgttctctgcctcgggagctctctgtcaattgcaggagcctctgaggagaaaattgacctttcttggctggggcagagaacatacggtatgcagggttcaggctcctgacggagttggggcaaccctggagataagctcacacaaccctgcaagaccaggtgctgttaccctagccaatctcatggatgaaccagatcaatgccagatgagctctgcctaaaatgattttttggtgaactctgaaaagtggaatattgtttctgtaagaatatccatctgagactctatctcttggtaataccaagagttatcagtttctctttaaccgagacaccagcaaagtgcctgctccagggtactgcccaggggagccctccatttgtagaatgaatgagagtccaggttatgaacagtgcctggagtgtaggaacaccctcctttgcctctttgacaggtctgcatcataacactttttttttttttttgagacagagtctcactctgtcgcccaggctggagtgcagtggcacgatctcggccccctgcaagttccgcctcccgggttcacaccattctcctgcctcagcctccccagcagctgggactacaggcacctgccgccacgcccggctaattttttgtatttttagtagagacagggtttcaccatgttagccaggatggtctcgatctcctgaccttgtgatctgcccgcctcggcctcccaaagtgttgggattacaggcgtgagccaccgtgtccagcctgtaacacttcttatagcactgagttgaaaccttgctcctcctggttcctccaggaaactgaaatctttttgagccaagtctagcacagtgcctggcatgtacattcaggtggtagagtttgctgcttgaatgggtgaatgggaatttgacagcatttttattcaaattagtatgtgccaggtatcgtgctcgctctgcattatccaagggagtgagcctctgtgcaagtatttgagacacgagggaaataggttctactgtgggaaaaagagcatttcatggacttgctctccaagcagccttctgatttttaatttggctcccagtatcttgatatcaggagtcagtcacaagaactccatctttagtaagttatattttccacaggaaatctaaaagctgttcaacatgttagtttcctgtgaatttgataagccataatccattcctaacactgagccctcctgaaatttggtgtctggtcctgcagatagctaaaagccctgtctgggtggcctaggggactcctctgttttgcctccacaggatccactttgcaaattaaccactggttctcccgttgtaggaactgccaccttcctcagagcctgtctttcttccttccttccttccttcctctttctttttctttctctctctctttctttcttttcttttctttctttctttctttctttctttctttctttctttctttctttctttcttcctttctttctctttctctctttctctctttctctttctttctttctctctccctccctccctctctctctttctttctttttctttcttttctcttttctttctctctttctttctccctccctctctctctttttctttgtctctccctcccttctctctctctttctctttctctctctctctctcctagacaggatctacctttatcccccaggctggagtgcagtggtacaatcatgcattcattgcatgatcacagcagcctcaaacccttcctcagagtctttatgcggcaaccagcagggtctggagggttggtggctctgtgaactctcctgacagaacacagagatgtctttggtctgttgatgtgattacaagctgaacgaaggaggatcaaagccagtgacaggaagggagatatgcaagggacccgagcatcagctctgagttagtccattctgcttctgggacttgggatacaggtcagaaaccttgagcttctacttctccatcttccaattgtagcatccaggacctcagaatctgccagctaagaggagccctaatgattgtctggtgggatatggtgggaccacagagatgaagacatgaatagctatttgaatgtgaacagcagacgaagaaatcaaggctaggagggtggaagtgactcatccaatagcacagtgtggttgaagcagcactagtatccaggttgcatgagcccctgatgctttcgctcgagggaaattttggagccatggggcaatgccccctgacgtaacagtctccacagttctgccatgtctcatcctggccctgtaacctggacccaaatctgctaccatcccatccatctcaggaagtgaaacctcttatgtcaaataggttgtgcaacgtatgtatcagatcctgtcttcccaaggagaccgctcaggccacagcacttccttccgatccccaatgagcagaaaatatctcgctataaacatagttggcactaagggagggagtggaagagtgatgatgatgtagatggtgatgtagccccaaggaagtggaacaagcagagatggggagctggaaatgccaggatgctccagcttttggggaattattcagctcttgagtcactaaagcctttctcagctgcaagttcctctttaccctgtcaggtcattcttccaagacaggagactgacatttattcaaagcagcaagtgccctgataccatcttgtgtctaatcatgggcttcgcagccagttatcaaggttgatctcatctcattggtcttcaatcattttgaacaagaagacaagcaaaataatcatgggttagttcttatattattgtgtgtacatgcagtgatgtctgttctttgtagtgagctgttccttccttgttcaccctcttgcttagaacagaactaagcaatctgcccccaacattttccccaatttcccatctcattcttggcactggcttcctaatatttgttcttatgagtcattttcttgtatcatttccatgagtccctctgggatcttaaagtatgaaaaatgttgtgtgtacccacacctgtctttgtggatatttctctcctttcccttctgcttctgggattatttgggaatgggcactatgatttttatcatatcgcttccacttcctttatggcatcatctccaatgggcttcttctccctcttggatccaggttctcagattggggacatgcagagtccaaggaacattccattctcctccctggtctagaacaaggagggcttagatatatgagcaggtggctggggctggcgagctatgtagtctccaatggcttttccctgatgtcggagttgttatgtcagttctgggagaccaataagaccttgtccttcctttggatccatcagaaaaagcccctgggtgggtaagatggatggcagggctctcctactctatgtcttttctcacacctagtgggtataagagaggggaccacaaacagagggggctctggtaccacttatccagggtctggaaacattttctgtaaagggccagataataaatgtttcaggtacaactactcaaccttgcatcatttcagaaaagcagtcagataatacataaatgaatgggtgtggctggacttgtcctgcggtcccctgtcttatatcattgtattatatcattttttcttacatacaaatttagaagcaatacttaaaaaaaaaaagccgtcctttattgagcacctactaagtgccaggtacctttttttccctcattatcttattaactcttcataataacctttaaagtagataatattgaaccatttgacctatgcagaaactgaggttgagacaataaattatttaagaccgcacaaacagtaaatgctggaactacgactcaaatatgggttaactgaaccaaaaccagatctttatttctcacttttaattgttacatatgtttattgcctcatctcctgtccacatggtgcccatcggcagactcctttctcattctcagtgattgagtgacattctaaactacattggcctggcagattcacctctgtcccctaaatgtttccacattgtccttttaggattgagatcctctctgttcccttgtcttccctcctttcttcttctggcggtgacgtgctgtgtgaatttgtttctttctcctctcagggtagtactgggactttccaaatcagggtttttaatgatctctcttcncttttctgaatttcttccttattcccattcactttctcatctataagtggcanctttgttgctggaagatatcccttgtgcagggattnctctttaanaatttgtcnnnaccgtgatcgtcaacctcccaccctgtagggcctcaagcattgaggacaatcactggctgcccattaacccagaaatgttgccgagacaggaggccgtggcccaagttcctggaatggggtattattatgtcagcacaaaggcctttgcacaaatgaaggctttaaaaatgcagtcctagtcaggtggaggagggcttataggattcccaggaatctggatcattctcttgagagctttcccttgtctctgttaaaactcacatcgtacggcccaaataacaacaaaaaatggatgtaaattcttgaaataacttgtggatgggggaacaaggcccaccccccagatctgccagaagcttcaggtgagggtcccaaatgccaaaaagtctggtatcagagaggatggccagtgacntggggacacatgccctttgctgtgtcactcaaggagcagcagcttcggccccgcacagtgaccaggaccctggcttcccacgctgggcaggagctggtgtctgatgaagggaatgcctggcagcacgtgctgtctgtctcctcgtgtcagcttacctggctttgctgcgaagaggccacttgcatttctttattttttatatttttttaattttttaaattttttattttatttttatttttatttatttatttatttttaatttttttttaattttttaaattatgctttaagttttagggtacatgtgcacattgtgcaggttagttacatacgcatacatgcgccatgctggtgcgctgcacccactaactcgtcatctagcattaggtatatctcccaggttaatccctccccccctccccccaccccacaacagtccccagaatgtgatgttccccttcctgtgtccatgtgatctcattgaatttctttaaaggtggaatctctcagtggggtctaatctgttcagaaatatcaaaagagtatccttgggaatgactggaattccagagtcatctggtaatcctcataaaacaactcctggatgtctctcagcacatctcccaccttgaacgcaggaggctggttcaaatggaggagcatcgctctactgcacttttttttttttttggcctaaagtgcaaaaggggatacgtttcatgtaaataaatcaactgcaaatcgctagttatgctgagccctgtcccgtgctgtggacacaaaggaaccaaaggcttttctccccgcccaacacacacataacacacacacaaaatcataaaaacatacatacccccaacacataacaacacacaacacacacacaaaatatatacacacaacacacaccaaacatgcccacaaacctgtgtccaaaaataaatcctactggtgggtttgtggtctccctaacttcaaaaatgaagccgtggaccttcgcagtgagtgttacagctcttaaagatggcatggatccaaagagtgagcagtagcaacgtttactgtgaagagcaaaaggacaaagcttccacaacccagaaggggaccccagcagggttgctggttggggtggccagcttttacttccttttggcccctcccatgttctgtttccatcctatcagagtgcccttttttcaatcctccctgtgattggctacttttagaatcctgctgattggtgcattttacagagtgctgattggtgcgttttacaatccccttgtaagacagaaaagttcctgattggtgtgttttacaatcctcttgtaagacagaaaagttccccaagtccccactggacccaggaagtccacctggcctcacctttcaactccataatggcatgaaaatacatatgttgtacaaaacatacatacacaaagtatacatgcatctccccaaatatacacataccacagaaacatacacacaggaactcagctacctgtcaaaagtctgcatggtgattgcctctgcagtgagtagttagaaaagtgaatttgtttttcaataaattggagtccttaaaaatcgttgtaagatagaaaatttttaaaagtatataaaataaaatatgtatgtcctttggtctagcatttacacatgtaggaatttatcctagtggagtaatcaatgatatatgcaaagatttggacaagcatattaagcacagaattatgtatgcatatgtgtgtgtatatatatatatatctcatacatataataatgtaaaagtgaaaataactcagatgttcaaaattgaggattagttagactatgatctgtccatatgtgacatacaagttagctgccccttattctctcgagcttcaacctcctataaacagtgtcccttgtatatcagtattggtacagataatcgaacttattgaggttttacatggggcaataaaggcaagagtttatgaatactccatactacactaggtagcaccccctattaaagacaaactcttctctctcatttcccttcctttccggaaccacttggttgaatctctacaagtctctattgcaactgcctcaacatggcaccctccctgcatctccatcttccctgtcctgagagcaatggcctgctgcccccacactcacatcctcattcattccagaagtgagcaccacagaagtgcctacagttaccccaaccaccttcttagaagataagttagtgtttgttttgactttttaaaatttttacttcctcttttccttcacaatctcatcccatcccaagaggtttatcaagaagttctctaaagatatgtgtctccttatggaatttaacagaaatcagggatttgtattctagccatcaagggaataacatttttccaggtctttagacaaataatggaataccttgcagtaattagatacactattgtagaaaagtattgatgaaatggaacgatgtttgagatatcatattgagtagaaaaggcaagatacattaagtaggaaatgtatcttacaaaataatttgtcagacacactcctatatttgtatgttatataaatgcgtatgtgaagaaaggctagaggatgagaccacagtcttcggtgaagtttaagagatgaggctgcagcatgctcagaaaggcctgggttatagttcttccagtaattaaggatgtgatcttgggtaaattgtccatcctctctaaactgcaccaccttttgtctgtaaaacaggaaggatggtatttacccccagggtcatcaaaggatttggttggagaaaaataaataaatgggctgagcccagacctggcacagtgagagcacagtggttgactattgtgctggcctgttgttcctgtgttattgacatgctgctggtggtggtccagaagctattaccttaattggttatgtggatttcccctcatactgagcagctgtgtgtggtgttgtaaaacatagccatacacagtaactgacaagggcaaatgtgatggaaaaatgcaaggaagtgcagataaatagctaatgggctgtagaaggaagctagtccttggagggcttgatcaaggaaggtccttttgcatgtcacctttgaagaagaggggacatagaagaggtatagtgcatcccggagtgtacctggaagggaacatgaaaagaggacatttttctctgggacatggggactccacttgcatgaactctggaattggggcaaagaaccatcatgagaacaagggcttccttgaacctcccaggctcattggctgatctaaaccctgtgtcccctctttccttcactctcctctgttttctatacctgtattattggactggactggaagccacctgatctatcacaagtaccttgaaatgtgttgaataggtgtggcacagtccttagcagagtggcactacccccacaggaatttgtttatacctttggcatggaaaatagcaggaaatgagtgatcactgataactgaggatgctatttattattggccaaaggaatacttgtgttgtatttgcataaccactcacaaactgttgattacaaatgagtaccagacctagctccttcaagtaaaggatcctgagaactgaaggcaaacagagctccaggagtccaagacagagccacagaccacgaggatccctggcccaggtaggtggtcctcctgcactggctttcaaggccaacaggatggatggggaagtagagtagcatctggccatctagacccttgctttttatccccactggaagcacatctgaatttctaaatatgatctctgagacctgcccagaacaccttgctctcagccccagtagcagcctgctctctcccaggagggcttccactaacaagtagggcattgctggagggccaggcagacactagcttaggaaatccaccaaccctggaaatgctagtcccttctctgaaggctcagaagactgactttagagtctagaaaatattggtccttgggaacagattttgagtgcaaagagatggacttcagatggccagatgcactgcttctttagggaattctgtgaaagctccctgcatttatcttaatacaggcagcagatttcatgagtacccccgagggatggccccaggtcctccagcctgtgagcatccttctgtccttcagcagcaccacagtatctttatatgtctttggatacctacgtttctgccagacatctcttgctctgatgttctggctgccaaattctctgtcaagcgcctccaattttttgtgtcctttgatttaccccaacatgacaaaggcagttgtgcttcatgtattcagggatactgccaaaccacaaacaggttaaaatcaaatagcagatatccctgttcctaaagacccatcagctctacccacctgctcctgctcaccgtccttattgttgagtcctgaagcccttccttgtcatttttattttttgcatgaacaatttagttccctttgtctcactcctaaacctttctcaaaggattggatttgtacacaaactgcctatctctgcaatcttagaagtgatatgattctgaacaaatcacttaacttttgattttttattggtaagatgggaataccaatttttgctccacttctgtcctatgttggcctgggctgatgttgaaagctctcggtcaactgagatagggtgtgcagaatttatatatataaatatatctcctccaacccctcccaatgaagcaagtcacgtgagtcaatcctaccctaagatattagggattgagcctcctgggacatttggtggcttaggttttcatgaaaagaggttgcagagcaactgctttttgttaggcaaagattaggctactgcagagactcagcaaacttctatagaaggtgtcagatggtaagtattttaggctttgcttgccagatgatctctcaactagttaaccatgctattgtagcctcgaagcagccagagacaatatgtaaacaagagcatggctgtgtttcaataaaactttatttaaaaaaacagtcagggaccggatttggccaaaggccatagtgtgccagccccaagactagagcaatgcacttttaacttttttattttatttttgtaaaatgccaagatccacaaaaatgctattgcaccccgtgtgttagcactgtgactcaaggtttgggaaattctgctttgaaggcgtgatagacaggagagcatggtctggccccttggtgcctttctggttgcagcgagcatttcaaactacagagcaaggccagtggtctgttcagcactagagacatgcagcaaggtgtcctggggtgagaagatgccataactggtcccctttctatctccttaggtcttggacttcattccattttctgttgagtaataaactcaacgttgaaaatgtcctttgtgggggagaactcaggagtgaaaatgggctctgaggactgggaaaaagatgaaccccagtgctgcttagaaggtaaggttcttgtagaaatctacctcagggccaaagtgtaattcctagagcagaactttgctaggtgctgtgcacagacccagttgtttcctgctgacttgcacagtaagtgagctttcaaatttccctggacaaataactagacaagagaaattctggaagagaaaaggaagctttgcttcagtgtccaggcacatcaggtagtagataaaaggatcgtcctcacctacagatttggggctttagcatcctgtttgccaactggatggttgcatatgcttcaaaatgcacctcttccctcccaacattcccaagtggaagagaagcctccgatgagaaggaactctctaaggctgggctgaacaaatgacccaggcacagggcatctgagtattccatgaggaacacatttgggtgttgcccatgggggacaataggaggaggcttttgacccaaatgattgtctactgaggtgtgacgggagaggcctgtgacatgccagaggccaaacccgtgatccagttcatctctattctatgtttctgaagagggaagctatgatttaatgtcattactatcatgctgctctagtatttctcagcacatacacagaagagggaattaaatggtccttgatacccctaaatccttggaaaatccgaattgcatatgctaacctcactgcgtctgactgcagacccggctgtaagccccctggaaccaggcccaagcctccccgccatgaattttgttcacacaagtaaggcctcggggtgaggtgatgggggtggctgaggtgcgagggtggggatgggggatggagccattgggtcctcttacagggtgagagaattgtagaatggggacacctaagggtgctggatggggctgaagtctttcctttgtggaagcaaatcccattaggagataactctgggaaagatgagcccggggaggggcaggtgatgctcacctgctaagaggcaaagggcaaggaagagtttgtgcctgggaaccttccaggtgcctcttctgaccatagccaagagactggagacacagacctcctcccagcactgaggacaaacagccatggggccagtgggggtgcagggacacccacaccactaagggctcagggcggcgccttcagagcctgaaccttcctctcatgctgccatttgaacaccacaacaccctaataggaaactgttaacattgccactgttcaggtgtggaaaccgagacagacagtggagattccctgccctaggtgacacaggtaataagtgacagatgtggaaatttaaaggtactataacgtctgtctgcctgactcaggcttaaggctcccatcacctcctcttctcaggacagagtcaggaggcctcagcctgagccccagctctagtgcaggttcatgtgggaatactgagcctcactagtacaatggcagagaggaccaaatgggaccaggtgtgtaagggtgcctggcacagttgggggaggctgctgtcgcttctccaccgctgctgctgcagttacctttgatgttttagttttgttgtagttacaccattgctggctttggatctgcactgtgtccactccaggtggaaccacgcacacaagcctctctgtcgggcctgtcctgacttctccttgtcagggctgggatctccttcaaatctggcggaagtggttctccaagtctggtcctcaaacgtcagcagcatcagcgcctagaagtgttaggaatacacattcccaggccccaccacagacctcctgcctcagaaactcagggcgctgaggctctaggggctgctttaacaagccttccaggttatcgtgacgcaccttgaaagtctgagagctactgccctacagaaagttactagtgccctaaagctggcgctggcactgatgttactgctgctgttggagtacaacttccctatagaaaacaactgccagcaccttaagaccactcacaccttcagagtggccttgagaaagatttggggtcaaggatcatgagcgagaacaccacttaagaggatagtgaactagtctgcatgtgagacgctgagatcctatgtcaggctgtgataggagggaaacagaaaccaaaggaaagaacagctttaagaagcgcttaagaggtacaaagtaaaatgatggtgctagaaaagtagcttcttaaaaagagcattttccagtctcaccctggactaactgaatgagaatctcaggagtgtgaggcccaggtatccatggtcttaaaatgccacccaccaggtgattcccagtgtgcaccaggggtgagagtcacagccttaggccatgccactcaaagggtgtcttcagaccagcagcacccacagctctgggagtgcatcagaaagacagaggcttggcaccacccacacctactgaaccatagtttgcaggtgatttcttgcacattaaagtgtgggaaatggaaaagcttagagttcagctagctcggtgactctcagtcaacctgcacctgctccatgaactcagactgcctgggatgggcccagaaaagctcctgaggagattctgatgtaaggcagggctgataaccatggatctcatctgaccccatatcactggggagttacttaggatcttgcctggggccagtcatctcttccatagacactgagagtgtccacgatgcttggggcactacagggtgggaggtggaggatcacgggtgagtcagataggaagcctgctcctggggagcttacagtgctatagggcagcaagccaaggatgccaatacctgtgtgcaggtaccactgacgagtgcagagcgctgcagcaccagagaggaagctaccctgtgcagagggggctgaggagggctgcagggagatgacaggaaagccggtgttacaggaggagtcctccccactctttgggcatgaggagaccaggaggacattctacagtgagaaacccaggcagaggccatgtgcttatggcatgggaaaagaatgacaccttagacttattctctacattagaattgcctaccacagatacccatattatagcttcacatagtgtggtggttactgtgttttcatattgtcacatttgccattttccagccacccacccattcttgacagtcactggcccagcctgggggcccctgttctttatcaaacaagtgcctgagctctttgcagaggtgagggtcacctgtccaatcagaggccaggagggaacgttcccttttaagaccctactctaggcaggcctggcccaaatgagttgctaggagcccacgccctaagaaccctctgagcactgttgtggctggtcctgctgctagaagttgttcctccagggccaggtgcaagatttgtggcttttcaaaggagccactaaagctccagctcagccttgcacggtgctgggctcctgggggcttcctgcctccaaccctcccaactcttccatcaccgctcccttagcctggccagtgcagggatctgttccactctaggcactgctgagggaatgatgcctccagtcagagggtgcaaaaaagagagttaagaaaaacaatgattataaaaagtcctttttatacgccagacattttctttgctcaggctaagtgctacttatttgagtaagcattttagttctcataactcctctctcaagtaggtgctgctattactttcatttcacagatgaggacattgaggtttggagagacttagtaacttgtcctctgtcctacagcagagctgggatttgaatctatctgtccaaatctggaacccatttgcttgcacagaaagcttaattgcttgtcccagcaagatagaaagcctgggagtggaagaaatattcagtggctgtgatgtctgagcccacaggcagggtggagagctagggctggggcccttggacgtggggaagaaagggctgagtcttccattttcaatgtgaagtgttgatatctggtgatattgatctaggtccaaaggtgaagaacttaaacccgaagaaattcagcattcatgaccaggatcacaaagtactggtcctggactctgggaatctcatagcagttccagataaaaactacatacgcccaggtgactctcagttttggctgtgttttctgcctccacctagcaggggtaaggcctcctgctaggtgggctcaactccatgctataccatgccccatctccagcaggtggtggaagcgaggaggagaggccccagggactagggcatcagatgaagggtctctagcaatgaccagatctgaaagtagtctttctggaagggctggagaaaaagaaggaggcagacacttagactggaagaagaggaggcttaaaccggtgtgatggagggagaagtggaccacagagtcaagggagagggactgtgcatcaggcctgaaaccccagcagacaggagagacctttccctgctctcagaacccacacatgttctgactgtctttttccagagatcttctttgcattagcctcatccttgagctcagcctctgcggagaaaggaagtccgattctcctgggggtctctaaaggggagttttgtctctactgtgacaaggataaaggacaaagtcatccatcccttcagctgaaggtgagagttctagctcagtttcctgggcctttggctaccccaaagtaaaaggccaagatcctcaatgcctctcgctttcctgcaaattcttatcttggccaatataacagggacatccacctttctggaagcaccaggcagaagagccccataacttcttctctggttccttgccccttctagggaaggaggagagactcctcacagcggggagacagcaaggagctgagcacctgttctcctctcctgggctcactggtcctggccctgggcgggtggcggtcccctcctgctgtggccctccatgtggcaagcaacacaattgggccaggaccctggcgtgctgctgtagggtaggagggtgtgagggagcactcggagggcagtgtgtctgccctgcaaatttagtcctggatggagcatcctttcacttgaggggagaaatcttaggaagctgaattagatacagatctaagccatattctctaattttaaaaactatagagctgagattttggtatccatctgactcttacgtctctctctctctctctctctctctcagtttatttttaatctgggggacaagaaggcctggaaaagagggcatgattgcttatcatcccttaaataccagtaccaaggctgacacgtcatctttcccaaggaccatctgccttctctcttttcctcctctcctgtgtaaaggcctggaggatgagcacatgtgctgtgttttcctccctctcaaagcctgtgctatctaattaatcccttttacctcacagaaggagaaactgatgaagctggctgcccaaaaggaatcagcacgccggcccttcatcttttatagggctcaggtgggctcctggaacatgctggagtcggcggctcaccccggatggttcatctgcacctcctgcaattgtaatgagcctgttggggtgacagataaatttgagaacaggaaacacattgaattttcatttcaaccagtttgcaaagctgaaatgagccccagtgaggtcagcgattaggaaactgccccattgaacgccttcctcgctaatttgaactaattgtataaaaacaccaaacctgctcactaaactttctgtcattgggtttcatttctcattcatgctttaaggatttgtgtttttaggatatagcaagaagcttgtttaattacaaagttctgggttggaaagagaccggcttctgcttgtgtactgctaccctgaaccatcagacatgcatgtgtgtgtcatatgctatgatgtggccagtctgagtgcaatacttgcagcgggaaggagcagctgggtgcatgctgtgctctagaattagtctttcctactggggtttggtagattctgagggcattgatcctggggcagaagtggctgagtctgtgtctagggtacagtgtgcaagaaagaaatgtaacagcaagtcacaatccagccaagtgatagtggaaaaggggtagttaggtcccagataaggagcagggtgacttgacctgtgggaaaggcacagagacaaggaatctgggtcagatgacagccaggagaccaggtgagggaggagccaggtactgtctgggaggcttgtcaacaagggcatggtcctatcactaagcagggctcagatcctcataatgggggagtggaaggctggccgaacagaaatcagggcctggaaacagagtgagggggtggagacaggagactgaggcttggaaattagtttattagttttagctcttcagttacaagcaataataatagcttctagcttatttaagcaacaagtatactacaaaaggagctttctagaaggatattgggtatattcatttcttactgctgctgtaacaaattaccaccaacttagtggtttaaacaatgcaatgtattatcttgcagttatggaggtcagtctggaatgtgtctcactgggccaaaatcaaagtatcagcaggatagcattgctttgggaggctctaggggagagtcaatttccttgccttttccagcttccagaggccacctgcattccttggctagtggcccactcccatcttcgctgcttgggtttttctcacactgctttgctctgaccctcctgccttcctctttcacatataagaacgcttgcaatttacatcgggctcacgtcaatatccaggatactctcccgtctcaaagaggcttaactttaatcacagatgcaaagtcccttttgctatgtcatgtaacatatacacagggtctggggattagaatgtggacattttcggggtgccattattctgcctatcatgtgaagtaactttcaaaatggaaagacatgctgaagaaaaagtcagggatttctggcaggccagaaatgacagaaggcagaaaacgttggtcccatcactcagatgggtaagagccaatcatgctttttgtcagttagcaaaagattgagattccaagcaaagcatgcaactgccctagtttgggtcatgtgtcgactccttggtcagtgaagggcagcacaccttgatcaatactccctccaagactgtatccaacgaggccagtgatgttcctcaaagcagagctagagagctaatcccaggagagaggcgtgtgggtggtgggcaggaagacaaagctcagccgtaaaggagtagtagggacagcaccctaggcatggaggctcaagtgagatgatacccatgggaaaagctctgataaggtcagctccttctgtttctgatcctgatggtgatggtgatcaacaccagcccagtgacaaaaaagtacatagtatatttagtagatgtttcccacacagagaaatggtaaatattcaaggcgaggaatactccaaacatcctaccttgatcattacacattccgtgcatgtaatgagtacttgcatgtatgccataaatatgtgaaatattatgtatcactatataaaagaaaaaaaaatgtggccaggtgacatccatattttggagaggaaggcatgtcttcttcataatatcacaaaactattttcacaacaaagacacagctgttcaaattagtctctgagccggggctgtctcatggcagtgaggactctggttcccttacagactagcagaaaggagatggggcttactgaccatggccttgaggaggctgaacatgcaggccaaatggagacacagacagcctgggcttggtcctgctccatccccttccaacctgatgagatatagtgagtcactatgacgtgggtcactcatgcttcctgtgaggctccaccaagacagcaagtgcatcaacaccttacggaagcacaaggccctgtttgttgttgacttcatgaaaggcatggttgtggtgatcgcattgagtaggcttttgggtgagaggtgaaaaaccccaactatcatgcattgcagccctctggtggaaactgtgcttcaggctctaaatttcaggctctagactgactccaggatgagtatttggaagctgaagtcaatctgtggtctcttctcctgtagagcaggagtcagcacttttcatagagtgccagattctatatatcctgccacatgctctgttgttacagaacaaagaaggccatagacagcatggctgtgttggcaaatacacaaaacaggcaataagctgtatttggcctttaggctgcagtttgccaacccctgcactaacacagagcttaaaggtggtggtggtgtgctggagctagcttatatcagcttgcaatagccaattgctaacatctcttccaaactctgtgtctgtgccttgatgttgatagtttgaaattggctaccccatttaatgctgcaatcttttctcaccccagcactactgactcccctttgccctgtcttatttttctcactctaacatgctgtatagttttcttcttacatttattgtttgtgtcttccactagcatgtatgtcccacaagttctttgctctgtgatgtatcccaagaacccactgcagtgcttggcacttgtaggaactccataagatttttataaatgaagaaaggaagaaaaaagagagggagggaaaaaggaaaggaagccttctatttaaatgatggccttctccatatttctatagtaatatgacttcccttgcaaagggggatgcattttggaaaatgtgtataaataaactcaggtggttttgaatttcattttcctaactgtaattgtaatcattggtctttatgtttagtgaaaaagttttggcccttatgcctcacacctgagaatcccaaagtattggtttgttagagctcccatagagaaccataaactgggtggcttaaaacaacagaaatgtatcgtctcctggttcaggaggccaaagtctgaactccaggtgttggttcattctgagagctctgagagagaatctgttccaggcttcccttcagtttgtggtagctccagggttccttggctggtggcagcaaaactccagtctctgcccccatcttcacatgactgtcttctctctgtgtttctgtgtccagattgtcctataaggacagagtcatactgaattagggctcactcgaatgacttcatcttaagttgaactgtatctgtaaagaccttatttccaagtaaggtcacattcacagctactgggggataggacctcaacatatctttttgggggacataattcaactcataatacccaacatgataactgttcatcccatgaaatttaatgtctctcaaaaggtgatctcagggcatttaatctgtgacagaaactcccataggaaacattccaaccagaagctcctttcacagctggtcactcctcctaccccatccgaggtcctggggcagggtgaggcaggtggggacaagaagaaggctgtctcgggtgtagaaagagaagacccttattcacccggcactctgttcatgaatgagctatccagcataggatataataaatcgctttaggagtggtagactccaaacatttttttggtcccagttatcctaatcaattaaacaaactctagaacccatcttgaagtgcaggcattgggacattatgaaacttacacagaattcaaaaatttacaagggctaaataaaacagggtctgacatctaatattttcttcccacattcccatgcactgtctggctcaaccatccccaaccctcactctcatcctggtggacacatgcctagtgatgtgatcagctggttcacagggggctggtgatggtggatatacagcttttgccaatttccatggcataactactccaaatatggccaatttcaaactaccaacatgaaggcacagacacagagtttggaagagatgttagcaattggctattgcaagctgatataagctagctccagcacagcaccaccgctacctttaagctccttgtgttagtgcaagggttggcaaactgcagcctaaaggccaaatacagcttactgcctgttttgtgtatttgccaacacagccatgctgtctatggccttctttgttctgtaacaacagagcatgtggcaggatatatagaatctggcagtctttaataagtgctgactcctgctctacaggagaacacagattgtcttcagcttccaaacattcatctctgagtcagtctagagcctgaaatttagactgaagcacagtttccaccagagggctgcaatgcatgatagttggggttttcacctctcacccaaaagcctactcaattttttactgcaaaaacatgttatcatcattattttttacttagcccacctttccttggcaattttccataggaaaatgcattctaaatttcaactaatcaggggacttggagcctctggacacccccttgttccttgcccacagtcccttgcagaaggtgccttatcagagcggctccatgcaggggctcaggacaggatcagatgtcagttgcaccaagggggcagggacagatcctctctgctgaccatgcagaagggactgttcagtgcaccgtcatggtcctggtgatttctggtccataagggaattttcacatgcatcgggtgattgtcacatcagcacaacactgtgaggaaggcagagtgagaatttgtgtgcccattttataggtgagaaaacagatgcagagacattaagtaacttcaccacagtcatgcgggttttaagtggcagactttcaggtgttgtgactcctagtccagagttctttgcactgcccctgaggtgctaaaactctactgtgctttaagactcacttggggagcttcctaaaaagagagattgcacaacctgagattcttgtttaactgttttgggatgtagctcagggatctagctgccttaaaaaaaaaaactcccaagtaattctgatgcaagcggttcttttttgtccacctttgaagaaacactgcctcctccccatacatttcattagaaaatggtaacatgtttttcagcctgagagccatttctgggtgaccggacgtcggcagcccgctgtactagctttcagtctaggcttaaacacacatgataggagatgtcctactccagatgatatgagtctgaaccatggaaaaattccattgtgtggcacatctggtgggtgtgcactgtccccagcagtgaggcacccagtgaagacagcagctgggagaggcttagttacatgcagtgggacagtgtgggctagactgctgagccctctgcagtttactctgtgtcaggcaatgagggtgaaaggctgatcagacccacgtgcagaccataccctccagggagacagatatcagtcaggacaaccccaagtgtagctggagaagcagtgcccaggtatgaccggatgtgtatccaaccaggaaatctgcatataaatataagaggagaaaatgaacagatgttgctcttatatgtagatatttatgaagagcatataattttgttttgtgtgttttaagaagtttataagtatgccttaaaaatgtatagtatatactgtaggtattttttccattagatattttgtttttcatacttatccacattgacattgtagcaacagtataatataacaacctcctctacaaaagcagaaggaagtgaagctttggaaggaagcacccagtgagcttgcccctttcaggtgggtgcagtgagcaggagtcagtgaggttgagatcctttgagaggaggcaatcattaaccaggaaatctgcactgcatcctggccacacctaacccttggacaatggtgcttggagcgccttccagctcttaaggcttgcgatttctttctctcactcttcacccacgatgattaaatcttctcctacagagttggacaataaagccttgagttcctgcctcccctggtgtgatcacgaggcatagacatggccaggaacatgtaggtgtctttgaaagctgaacaagttagtaaatttcaaacctcatttcacccaccagtaaaatgggaataataataaacctattttacatagggttgacaagaggagtaaagagggattcaatgaaagttcgttattatcatttgtagtagcagtgttgataatatcaactgaaagttcattatcattattagtagcagtattgataaccctcttttctgtgccttctcactggtgggcccaggccatcagcaatgcccagggtgtcatggatctctgctgcatcgggcaccagctgtgtcaatggtgagaacagtacaagggtgggcagggcaaggcaggaagcacccaggagcagcagcttcatggggtgaagatgtcaggagcttagggacagtcagagcgggtgtgcctcctcttgtggagcctttctgcgtgggtaggaactgctgcagctgtggccatggattcacctgaatatgggtggaattaggcattcagctgggttagctgtgcctagaaggaggaactctaaactgagaacttgtccctattgccacctctgataggcagatgatccatccatcagtggctgagctgaggtgtgcatggggatgggtaagagcccacacacagggctgatgactgagtctatttagaacaatagatgtaaaatctgataatgtaaaatgtgatagattattttgtcaattagaaatggtaccatataattatatatatacataaacatgtatacatatacacacatatacatgtgtgtataaacacacacagtattgtcccctactcattccataaacctgatgcctttagctgggattcccagctttcactctcctctctgtcatctgctgtctatatcctccccatcctgtaattctggcttatatgccacttcctccctaaagccctccctcaatcccttgctggaagtgacattttcctctttgagctgcccctgcttgtgctttggtgaggtcagctgtattgcagtaccttgtattgtggttgtcacatcatcgtatagaattaatttctgacacattccgtatttttcaaagggcctagtgtggggctttaacagtaactacgccaccacgcccagttaattttttgtatttttggtggagacaaggtttcaccatgttggccgggctggtttcgaactcctgacttcaggtgatctgtctgcctcagcctcctggagtgctaggattgcaggcatgagccactgcacccagccacctatcaaaattttaagtgccatttttattttttattttttgtagaaatggacaagctgatcgcaaaattcacatggaattgcaggaggttccaaatagccaaaacaatcttgaaaaagaagaacaaagttggaggatttacactttccagtttcaagacttagctcttagctacaaagctacagtaatcagaacactatggtcctggcataagtgatgctggacaggtgagccccaaagtgggacttaacctgtgaaggttcttggccttgcccaggaaggaattcaagggcaagccaatgggacaagaaaacagctttattgaaggggcagtattacagctccagccctgttacagctccagccctgttacaactctgactactcctgcacagaagggctaccctgtaggcagagagtagcaactcagggcagttttgcagtcatttatatccacttttaacacatgcagattaagggacaatttatgcagaaatttctacggaattggtaataacttttgggtcatggagtcatcatggaaggggggcggggaactccctggtgttgccatgatgacggtaaactgatatggcgaactggtgggtatgtcacatgaaaagctccttccaccccagccctgtttcaattagtcctcggtttggtccagtgtccaagtcctgcctccagagtcaagtcccaccccctacctcttaaggagagatgtaaatacatggaatagaattgagagtccagaaataatctcatacatctatgatcaattgattttcagcaaaggtgccaagaccattcaatgagggaaagaatcatatttttttcaacaaatggtgctggataaccacatgtgaaagaatgcaactgggcccttatctcacaccatatacagaaattaactcaaaatggctcaaacacttacatgtaagagctaaaactataatattcttagaagaaaacagggatatatctttatgaccttggatttgctggctgattcttaaatgacactgaaagcacaagcaacaaaagaaaaaaaaataggtaaattggacctcatcaaaatttaaaacttttatgctgggtgcacacctgtaatcccagcactttgggaggctgaggcaggaggatctcttgagcccaagaagctgaggctacagtgagccgaaattgtgccactgcactccagcctgggtgacagagcaagaccctgtctcgaataaataaataaacaaatatataattatagatctctggatcttgccttcggagactgactcaactaactggtctgggtgggagcccagccatttgtattttttgaaaactctccaaatgattttactgtgcagccaaggttgagaatcactgtatcatagggttggactcctaactggaaacagtttgcaccatcaggtgtcgcagcattctgataatagttaagctttcctcctagattttctgatattagatgagtcatgtttacaagtttttaccaagagacaaactatctttctgcccttactttctctcttatactattctaatcccagaaccctttggaacttccactgagagatgaatctagaaagtgactctcttggctacaacagagagtaatgttggcctgtttgtgccagatccagttggtgctggtggtgggacagcacctccctgaaatcccctcctctcccgtcagattcagtcccccatttgcatcacgtacaatcatcactatgggtttctattaccttgctagggcatttggaggtaccatatataccaactattagttttgagccatggttcccaaagtgtggactgtagggcacctcagcacactcacgaggtgtcatgggatatttaaatattctgaagaaaacacagtgacatctgtcaggcccgtgaaaaccgttggcattaaattgtctcaacccaattgcttaagaagcagaactggccaggcacggtggctcacatctgtaatcccagcactttgggaggccgaggcgggcagatcacgaggtcaggagttcgagaccagcctgaccaacatagtgaaaccccgtctctactaaaaatataaaaattagccatgcatggtggcatgcacctgtaaccccagctactcaggaggctgaggcaggagaattgcttgaacctgggaagcggaggttgtagtgagccaaaatcgtgccactgcactccagcttgggtgatagtgagactacatctcaaaaaaaaaaaaatgagagagagagagagaagcagaaccatcaggtgtttcttttggcttaaagtactctgtgaagaaattcctgggacacgaaggataccatgaactgagagattttgggaacctctgctttagaagctggaggtagcattccttgggcacagtactgccttgggatcagcaaatccttttgatggtgcatttaggtgtggcaagacagctcttagagtgggaccgggatgtgcttggagacagagggaactagattgagctgcccgataaagacatgccagcctggcagagtgtagtgactcatgtctgtaatcctagtgctttgggaggctgaagtgggaggattgcttgaggccaggggtttgagatcagcctgggaaacaacaagacctctacaaaaaaaaaagaaaaaaaaaattaaccacatgtggtggcatgcacctgtagtcccagctacctggcaggctgaggtaggaggatcacttgagcccaggaaggtaaggatacattgagccatgactgtgccactgcactctagcctgggtgacagaaagagactctgtctcagaaataaattaaataaataaataaatatatagtggccatgacatccctagaaagacaaggtcctgggaataggtagaagccaagggaaatgagaaatgagagggggccctggagctggaactgggggagcaggatggcctctgagaagttcctgatagtggtgtcactgatgtgtctgatgtttagttgtaattatttgctgggcccctgtcatccctcatatctgatagctctttgctagtcaaagtgtggtctggggatcagcggcatcagcatcacttgagaacttgttagagatgcagaatctagagccccacccgggacccagaaacagagcctgcattttaacaagctccccaggtgattctcacacacactcgcatttgagaagcactgggctagttgacagattctcaggcatggctgacattgaaatatccagggagcaggcttggcattaggatgtttaaaagtcctccaggtgtttctaaagccaggtttgaggaattactgggctgatacaaatgttttgtgatgatgctttgtgtgtgtgtgtgtgtgtgtgtgtgtgtgtgtgtgtgtgtgtgtgtgtgtgtgtagggaattctgggtcacttggcaccaacacaggaaacaatggaaatatgtgagccatgacagaaaggtcaggagataaaagaaattagtgacatgagaggtactcctcaggtgttaggaaagagggtagagcaaaccaggttttccaccatatgttggatagggggtcaagtaaatttctacttaaaaattacaaacaggggctgggcgcggtggctcatgcctgtaatcccgcactttgggaggctgaggagggcggatcacaaggtcaagagattgagaccatcctggccaacacggtgaaaccgtgtctccactaaaaatacaaaaattagctgggcatggtggtgcgtgcctttattcccagctactcgggaggctgaggcaggagaatcgcttgaacctgggaggtggaggttgcagtgggccgagatcgcaccactgcaatccagagcgagactgtgtcaaaaaaaaaaaaaaaaagaaaattccaaacaggatgaccctaagcctgcaggacttggagacatctaggtgactgatactcagtcacaaaacataattggtcacaggcctgatgaaatgcacagcagaccttcagatggtatgcactcaagtgatatccacaagtccacctaaagaaatgctatattcagacatttggcatcaatctctatcaaacaaagatagtccaaagcaatgggttccaaaaacactttcctaagacaaattctctatttgcttttaatatcagtcatcccagcccttggaatagaggagcaaatgataccagtggtaccctaccacaatgcaccaaggtattatactctcatgctccattttctccctctgtctacatcactaataactcattgatttctggtgcaagccctgctgggagaaaaagtctactcttgtaccttggagcaagttgctcagagtaggtatcgaggataaaatttggaaagttagaaaagctattagaaggagatcctagtagttgaaaacacagcctggccaagtcaatgatgctatttcatctccccagccttgcatgtccatagctaaggaagacaatttaggcttgggctagaggatgggaaagggcaaaattactgatgccacagcccagagaggtattctagtaatctgagggtgaggaccacatacctggttcagggacgtacagtgttgacagctgtgagtggatgcctggagttctggcgtgtcttctagcacaatgatacctgagactcttgcatcattgggaataataaaatgggagtggatagatatgaaattatgatggcaataagcaatcagctaatagcttcattgatgggacagattaaagatggctgcaaatcctttggtccaggtttgggatataggcagcatttgtattggaatgctgatagtctgaggccatgaaaagtccacctgcagtagtggtaggaggaacaagcctcactttcttcaatgtgtgtgactgctgtcttgattccctgggtggccagttccattcgtgtggttctttggtccacttgactctggggtggctctgtgatggcttgaccaatacaatgtagtggaaatgatgctgtcatcatttccagcctcttccagccttaaggaactggcaacttttatttctgtcccttggaatacttgttcttgcaacccatccatcatacagtgagaaattctaagctgccccattaagaggcccacatggtgataaattggggtcttacatacagccctagctgtgctcctagctgacaaacagtagcaacttgtcaccaggcgagtgaaccacttaggactgtatactccagccccagttgagcaatgtggaacagagtaaaccatctcagcttagccctgcccaaactgcagaattatgagcaaaataatcccctaggctttgggctgatttgttccagattactggaacagaatttggtaccaggggtgaggtgctacagcaatgaaagcttaagacacgtgactttggttttgggtctgagtggcaggggaacttggcaggcctcaaggaaacttttagggagggttgaagcatagtgaggaaaacagtaggggaagctagaggaaaaaatgatgcttggtatgtagtggtgggaagtttagcaaaactcgcctgatgtaatgtgggaaattgtaagaactcagaacgatttaagggcatgttttataggtcctttaagaaacttctaggccaggcgcagtggctcatgtctgtaatcccagcactttgggaggctgaggtgggcggatcacaaggtcaggagatcgagacaatcctggctaacattgtgaaaccccgtctctactaaaactacaaaaaaaaattagccgggcatggtggcgggtgcctgtagtcccagctactagggaggctgaggcagaagaatggcgtgaacctgggatgtggatcttgaagtgagcccagattgtgccactgcactccagcctgggcaacagagtgagactccgtctcaaaccgaaaaaaaaaaaaaaaaaaagaaacttctagggctggtcccgtggaagcctcacacatggtacacaaaggctgtcttgaaaagaaacgtaagtgtgttttttggtttaataaaattgattataaatggataatgcaaaacattttaaagaattttactagcttacattagcagatttggatccagtgattgttacattctggtactgagcccctgaattacttctttgagtaaggcattataccaaagctattgatagttgggcttatagggtgtatgtttgaagaactactaatgtcaaaaccaatatttcacggtcgacaagaggacatcagaactggtaatccttattaccatgactggctggacagaatactcaatgtaatgggatttcctgcaaataaagacggggaagatgtaaaaaagatgcctgaacattcaacattaatgaaagatttcagaagaaatatgtatactaactgcagccttatcaagtatatggaaaaacacaaagttaaaccagatagtaaagcattccacttgcttcagaagtttcttactatggacccaataaagtgaattacctgagaacggggtccctgtttcttcgaagacccacttcctacatcagacgttttcaacagttgtcaaatcccctacccaaaatgagaatttttaacagaagaagaacctgatgacaaaggagccaaaaagaaccaccaccggcagcagggccataaccacacgaatggaactggccacccaggaatcaagacaacggtcacacacagggacccccgttgaagaaagtgaggcttgttcctcctaccactacctcaggtggacttttcacggcctcagactatccgcgttccaatccacatgctgcctatatcccaaccctggaccaagcacatcccagccgaagagcagtgtaggatactcagctacctcccagcaggctccacaggacccacgtcagacacacgggtactgagctgcatcggaatcttgtccgtgcactgttgtgaatgctgcagggctgactgtgcagctctccgtgggaacctggtatgggccatgagaatgtactgtacaaccacacctgcccagtagccaagttccttccaccgcttttcacagatcggggtagtggcttccagtttgtacctattttggagttagacctgaaaagaaagcgctagcacagtttgtgttgtggatttgctactttcatagttaacttgacctggctcagactgaccagtacttttttttccgtgacagtctatagcagttgaagctgagaatgtgctaggggcaagcgtttgtcttcatatgtcatgaattcctccagtgtaacaacattatctgaccaatagtacacacacagacacaaggtttaactggtacttgaaaacatacagtaggtgttaactcagtgaaataaccaggactcaaagtaagattattttggtacacctttcttgttagtgtcttatcagtgagttgattcattttctacattaatcagtgttttctgaccaagaatattgcttggatttttctgaaagtacaaaaagccacatagtttttttcagaaaggtttcaaaactcctaaagattaatttccaagtataagtttgtttttattttcaatctatgacttgactggtattaaagctgctatttgatagtaattagatatattctcattgatataaacctgtttggttcagcaaacaaactaaaatgattgtcacagacaatgctttatttttcctgttggtgttgcttgtgggaaaaagaaagagagatcagattgttactgtgtctgtgtagaaagaagtagacataggagactccattttgttctgtactaagaaaaattcttctgccttgagatgctgttaatctatataaccttacccccaaccctgtgctctctgaaacatgtgctgtgtccactcagggttaaatggattaagggcggtgcaagatgtgctttgttaaacagatgcttgaaggcagcatgctcgtaagagtcatcaccactccctaatctcaagtacccagggacacaaacactgctgaaggccgcagggacctctgcctaggaaagccaggtattgtccaaggtttctccccatgtgatagtctgaaatatggcctcgtgggaggggaaagacctgaccgtcccccagcccgacacccgtaaagggtctgtgctgaggaggattagtatacgaggaaggaacgcctctttgcagttgagacaagaggaaggcatctgtcttctgcccgtccctgggcaatggaatgtctcggtataaaacccgattttatgttccatctactgagataggggaaaaccaccttagggctggaggtgggacatgcggcagcaatactgctctttaagacattgagatgtttatgtgtatgcatatctaaagcacagcacttaattctttaccttgtctatgttgcagagacctttgttcacgtgtttatctgctgaccttctctccactattatcctatgaccctgccacatccccctctccgagaaacacccaagaatgatcaataaatactaagggaactcagaggccggcgggatcctccatatactgaacgcttgtcccctgggcccccttatttctttctctatacttggtctctgtgtctttttcttttccaagtctctcgttccacctaatgagaaacacccacaggtgtaaaggggcaacccaccccttcattgctgatttgtgagcgtgctttaaggtgaaaaaagcatgaatgttaacttccttaaaaaggtacagcatccaattcaaatatttttgtcctgattttaatgctagttgatgtagtgctattaaaattttgttcaacatggacacagagaggggaacaacacataccagggcctgttgcggggtggggatgaggggagggaacttagaggacaggtgaacaggtgcagcagatcaccatggcccacatatacctatttaacaaacctgcacgttctgcacacgtatcccatttctttttttttttaagaaatagaaaaaaaaataaaattttgttcactgattcttccattttaaaacttgtttgcatgtggtttaggatgcccttacttcagcaaaggagaaggaataggagggccttagaatttttgagggaaaaaaaccctataacatacattgtactgtatcaaactattttacatgaatgacacaagtattctgaataaaaaaataattgaacattgttaagaacaaggtgtcatgtaatttatttttcataaataaaaaaattatagtggcttagactgaaaggaacagagaatttaaaaaattaaaaagaagccttagtatatttttgtatatagtttccatgtgccatatttgccataattggatgagaattttttgacctctggcagggtgaccctatattttcantntataaagcgtgcatcatacc

SEQ ID NO: 88 - protein, 185 aa, Artificial Sequence
  Synthetically generated
  VARIANT (1)..(185): Xaa = Any Amino Acid
MVLKCHPPGDSQCAPGVRVTALGHATQRVSSDQQHPQLWECIRKTEAWHHPHLLNHSLQPGGPCSLSNKCLSSLQRSASAEKGSPILLGVSKGEFCLYCDKDKGQSHPSLQLKEKLMKLAAQKESARRPFIFYRAQVGSWNMLESAAHPGWFICTSCNCNEPVGIXNXVDFDLLGKAQKRGTGSE

SEQ ID NO: 89 - DNA, 746 bp, Mus sp.
  CDS (135)..(428)
gaattcggcacgagggtagtgtgcagacacattcctattcaatcagggtcaatctgcagattggcagctcagaaacaacatcaccataatgaataaggagaaagaactaagagcagcatcaccttcgcttagacatgttcaggatcttagtagtcgtgtgtggatcctgcagaacaatatcctcactgcagtcccaaggaaagagcaaacagttccaggaagggaacataatggaaatgtacaacaaaaaggaacctgtaaaagcctctctcttctatcacaagaagagtggtacaacctctacatttgagtctgcagccttccctggttggttcatcgctgtctgctctaaagggagctgcccactcattctgacccaagaactgggggaaatcttcatcactgacttcgagatgattgtggtacattaaggtttttagacacattgctctgtggcactctctcaagatttcttggattctaacaagaagcaatcaaagacacccctaacaaaatggaagactgaaaagaaagctgagccctccctgggctgtttttccttggtggtgaatcagatgaagaacatcttaccatgttttcatccaaagcatttactgttggtttttacaaggagtgaattttttaaaataaaatcatttatctcataaaaaaaaaaaaaaaaaaaaaaaaaaaaaaaaaaaaaaaaaaaaaaaaaaaaaaaaaaaaaaaaaaactctcgcggccgc

SEQ ID NO: 90 - protein, 98 aa, Mus sp.
MFRILVVVCGSCRTISSLQSQGKSKQFQEGNIMEMYNKKEPVKASLFYHKKSGTTSTFESAAFPGWFIAVCSKGSCPLILTQELGEIFITDFEMIVVH

SEQ ID NO: 91 - DNA, 294 bp, Mus sp.
  CDS (1)..(294)
atgttcaggatcttagtagtcgtgtgtggatcctgcagaacaatatcctcactgcagtcccaaggaaagagcaaacagttccaggaagggaacataatggaaatgtacaacaaaaaggaacctgtaaaagcctctctcttctatcacaagaagagtggtacaacctctacatttgagtctgcagccttccctggttggttcatcgctgtctgctctaaagggagctgcccactcattctgacccaagaactgggggaaatcttcatcactgacttcgagatgattgtggtacat

SEQ ID NO: 92 - DNA, 243 bp, Mus sp.
  CDS (1)..(243)
ctgcagtcccaaggaaagagcaaacagttccaggaagggaacataatggaaatgtacaacaaaaaggaacctgtaaaagcctctctcttctatcacaagaagagtggtacaacctctacatttgagtctgcagccttccctggttggttcatcgctgtctgctctaaagggagctgcccactcattctgacccaagaactgggggaaatcttcatcactgacttcgagatgattgtggtacat

SEQ ID NO: 93 - protein, 81 aa, Mus sp.
LQSQGKSKQFQEGNIMEMYNKKEPVKASLFYHKKSGTTSTFESAAFPGWFIAVCSKGSCPLILTQELGEIFITDFEMIVVH

SEQ ID NO: 94 - protein, 35 aa, Artificial Sequence
  Consensus Motif
  VARIANT (1)..(35): Xaa = Any Amino Acid
  VARIANT (2)..(2): Xaa = any amino acid
  VARIANT (5)..(6): Xaa = any amino acid
  VARIANT (8)..(14): Xaa = any amino acid
  VARIANT (15)..(34): Xaa = no amino acid or any amino acid
FXSAXXPXXXXXXXXXXXXXXXXXXXXXXXXXXXL

SEQ ID NO: 95 - protein, 35 aa, Artificial Sequence; identical to SEQ ID NO: 94
  Consensus Motif
  VARIANT (2)..(2): Xaa = T or E
  VARIANT (5)..(5): Xaa = A or E
  VARIANT (6)..(6): Xaa = any amino acid
  VARIANT (8)..(8): Xaa = any amino acid
  VARIANT (9)..(9): Xaa = W or L
  VARIANT (10)..(14): Xaa = any amino acid
  VARIANT (15)..(34): Xaa = no amino acid or any amino acid

SEQ ID NO: 96 - DNA, 33 bp, Artificial Sequence
  Synthetic construct
aaaaaagaattcgccaccatgttcaggatctta

SEQ ID NO: 97 - DNA, 54 bp, Artificial Sequence
  Synthetic construct
tcctctgtcgactcacttgtcgtcgtcgtccttgtagtcatgtaccacaatcat

SEQ ID NO: 98 - protein, 178 aa, Mus Musculus
MEICWGPYSHLISLLLILLFHSEAACRPSGKRPCKMQAFRIWDTNQKTFYLRNNQLIAGYLQGPNIKLEEKIDMVPIDLHSVFLGIHGGKLCLSCAKSGDDIKLQLEEVNITDLSKNKEEDKRFTFIRSEKGPTTSFESAACPGWFLCTTLEADRPVSLTNTPEEPLIVTKFYFQEDQ

SEQ ID NO: 99 - protein, 270 aa, Mus Musculus
MAKVPDLFEDLKNCYSENEDYSSAIDHLSLNQKSFYDASYGSLHETCTDQFVSLRTSETSKMSNFTFKESRVTVSATSSNGKILKKRRLSFSETFTEDDLQSITHDLEETIQPRSAPYTYQSDLRYKLMKLVRQKFVMNDSLNQTIYQDVDKHYLSTTWLNDLQQEVKFDMYAYSSGGDDSKYPVTLKISDSQLFVSAQGEDQPVLLKELPETPKLITGSETDLIFFWKSINSKNYFTSAAYPELFIATKEQSRVHLARGLPSMTDFQIS

SEQ ID NO: 100 - protein, 269 aa, Mus Musculus
MATVPELNCEMPPFDSDENDLFFEVDGPQKMKGCFQTFDLGCPDESIQLQISQQHINKSFRQAVSLIVAVEKLWQLPVSFPWTFQDEDMSTFFSFIFEEEPILCDSWDDDDNLLVCDVPIRQLHYRLRDEQQKSLVLSDPYELKALHLNGQNINQQVIFSMSFVQGEPSNDKIPVALGLKGKNLYLSCVMKDGTPTLQLESVDPKQYPKKKMEKRFVFNKIEVKSKVEFESAEFPNWYISTSQAEHKPVFLGNNSGQDIIDFTMESVSS

SEQ ID NO: 101 - DNA, 1291 bp, Homo Sapiens
  CDS (124)..(630)
aggagtcgacccacgcgtccgattagaacccatcactgaccttggaagctgctggagccacgattcagtcccctggactgtagataaagaccctttcttgccaggtgctgagacaaccacactatgagaggcactccaggagacgctgatggtggaggaagggccgtctatcaatcaatgtgtaaacctattactgggactattaatgatttgaatcagcaagtgtggacccttcagggtcagaaccttgtggcagttccacgaagtgacagtgtgaccccagtcactgttgctgttatcacatgcaagtatccagaggctcttgagcaaggcagaggggatcccatttatttgggaatccagaatccagaaatgtgtttgtattgtgagaaggttggagaacagcccacattgcagctaaaagagcagaagatcatggatctgtatggccaacccgagcccgtgaaacccttccttttctaccgtgccaagactggtaggacctccacccttgagtctgtggccttcccggactggttcattgcctcctccaagagagaccagcccatcattctgacttcagaacttgggaagtcatacaacactgcctttgaattaaatataaatgactgaactcagcctagaggtggcagcttggtctttgtcttaaagtttctggttcccaatgtgttttcgtctacattttcttagtgtcattttcacgctggtgctgagacaggagcaaggctgctgttatcatctcattttataatgaagaagaagcaattacttcatagcaactgaagaacaggatgtggcctcagaagcaggagagctgggtggtataaggctgtcctctcaagctggtgctgtgtaggccacaaggcatctgcatgagtgactttaagactcaaagaccaaacactgagctttcttctaggggtgggtatgaagatgcttcagagctcatgcgcgttacccacgatggcatgactagcacagagctgatctctgtttctgttttgctttattccctcttgggatgatatcatccagtctttatatgttgccaatatacctcattgtgtgtaatagaaccttcttagcattaagaccttgtaaacaaaaataattcttgtgttaagttaaatcatttttgtcctaattgtaatgtgtaatcttaaagttaaataaactttgtgtatttatataataataaagctaaaactgatataaaataaagaaagagtaaactgaaaaaaaaaaaaaaaaaaaaaaaaaaggcggccgc

SEQ ID NO: 102 - protein, 169 aa, Homo Sapiens
MRGTPGDADGGGRAVYQSMCKPITGTINDLNQQVWTLQGQNLVAVPRSDSVTPVTVAVITCKYPEALEQGRGDPIYLGIQNPEMCLYCEKVGEQPTLQLKEQKIMDLYGQPEPVKPFLFYRAKTGRTSTLESVAFPDWFIASSKRDQPIILTSELGKSYNTAFELNIND

SEQ ID NO: 103 - DNA, 507 bp, Homo Sapiens
  CDS (1)..(507)
atgagaggcactccaggagacgctgatggtggaggaagggccgtctatcaatcaatgtgtaaacctattactgggactattaatgatttgaatcagcaagtgtggacccttcagggtcagaaccttgtggcagttccacgaagtgacagtgtgaccccagtcactgttgctgttatcacatgcaagtatccagaggctcttgagcaaggcagaggggatcccatttatttgggaatccagaatccagaaatgtgtttgtattgtgagaaggttggagaacagcccacattgcagctaaaagagcagaagatcatggatctgtatggccaacccgagcccgtgaaacccttccttttctaccgtgccaagactggtaggacctccacccttgagtctgtggccttcccggactggttcattgcctcctccaagagagaccagcccatcattctgacttcagaacttgggaagtcatacaacactgcctttgaattaaatataaatgac

SEQ ID NO: 104 - DNA, 1377 bp, Homo Sapiens
  CDS (98)..(721)
gtcgacccacgcgtccgggaagctgctggagccacgattcagtcccctggactgtagataaagaccctttcttgccaggtgctgagacaaccacactatgagaggcactccaggagacgctgatggtggaggaagggccgtctatcaatcaagtgaatcaaatgctgttgggatggggctctggaggcttaggccctctgcactcacgctatctcctgtggaagccccagccttctctgctcctctctgtacactgcccttcccacctgtgtgtaaacctattactgggactattaatgatttgaatcagcaagtgtggacccttcagggtcagaaccttgtggcagttccacgaagtgacagtgtgaccccagtcactgttgctgttatcacatgcaagtatccagaggctcttgagcaaggcagaggggatcccatttatttgggaatccagaatccagaaatgtgtttgtattgtgagaaggttggagaacagcccacattgcagctaaaagagcagaagatcatggatctgtatggccaacccgagcccgtgaaacccttccttttctaccgtgccaagactggtaggacctccacccttgagtctgtggccttcccggactggttcattgcctcctccaagagagaccagcccatcattctgacttcagaacttgggaagtcatacaacactgcctttgaattaaatataaatgactgaactcagcctagaggtggcagcttggtctttgtcttaaagtttctggttcccaatgtgttttcgtctacattttcttagtgtcattttcacgctggtgctgagacaggagcaaggctgctgttatcatctcattttataatgaagaagaagcaattacttcatagcaactgaagaacaggatgtggcctcagaagcaggagagctgggtggtataaggctgtcctctcaagctggtgctgtgtaggccacaaggcatctgcatgagtgactttaagactcaaagaccaaacactgagctttcttctaggggtgggtatgaagatgcttcagagctcatgcgcgttacccacgatggcatgactagcacagagctgatctctgtttctgttttgctttattccctcttgggatgatatcatccagtctttatatgttgccaatatacctcattgtgtgtaatagaaccttcttagcattaagaccttgtaaacaaaaataattcttgtgttaagttaaatcatttttgtcctaattgtaatgtgtaatcttaaagttaaataaactttgtgtatttatataataataaagctaaaactgatataaaataaagaaagagtaaactgaaaaaaaaaaaaaaaaaaaagggcggccgc

SEQ ID NO: 105 - protein, 208 aa, Homo Sapiens
MRGTPGDADGGGRAVYQSSESNAVGMGLWRLRPSALTLSPVEAPAFSAPLCTLPFPPVCKPITGTINDLNQQVWTLQGQNLVAVPRSDSVTPVTVAVITCKYPEALEQGRGDPIYLGIQNPEMCLYCEKVGEQPTLQLKEQKIMDLYGQPEPVKPFLFYRAKTGRTSTLESVAFPDWFIASSKRDQPIILTSELGKSYNTAFELNIND

SEQ ID NO: 106 - DNA, 624 bp, Homo Sapiens
  CDS (1)..(624)
atgagaggcactccaggagacgctgatggtggaggaagggccgtctatcaatcaagtgaatcaaatgctgttgggatggggctctggaggcttaggccctctgcactcacgctatctcctgtggaagccccagccttctctgctcctctctgtacactgcccttcccacctgtgtgtaaacctattactgggactattaatgatttgaatcagcaagtgtggacccttcagggtcagaaccttgtggcagttccacgaagtgacagtgtgaccccagtcactgttgctgttatcacatgcaagtatccagaggctcttgagcaaggcagaggggatcccatttatttgggaatccagaatccagaaatgtgtttgtattgtgagaaggttggagaacagcccacattgcagctaaaagagcagaagatcatggatctgtatggccaacccgagcccgtgaaacccttccttttctaccgtgccaagactggtaggacctccacccttgagtctgtggccttcccggactggttcattgcctcctccaagagagaccagcccatcattctgacttcagaacttgggaagtcatacaacactgcctttgaattaaatataaatgac

SEQ ID NO: 107 - protein, 38 aa, Artificial Sequence
  Consensus Motif
  VARIANT (1)..(2): Xaa = any amino acid
  VARIANT (4)..(4): Xaa = Ala, Ser, Leu or Val
  VARIANT (5)..(6): Xaa = any amino acid
  VARIANT (8)..(9): Xaa = any amino acid
  VARIANT (10)..(10): Xaa = Phe, Tyr, Leu, Ile, or Val
  VARIANT (11)..(11): Xaa = Leu or Ile
  misc_feature (12)..(12): Xaa can be any naturally occurring amino acid
  VARIANT (13)..(17): Xaa = any amino acid
  VARIANT (18)..(37): Xaa = no amino acid or any amino acid
  VARIANT (38)..(38): Xaa = Leu, Ile, Val or Met
XXSXXXPXXXXXXXXXXXXXXXXXXXXXXXXXXXXXXX

SEQ ID NO: 108 - protein, 35 aa, Artificial Sequence; identical to SEQ ID NO: 94
  Consensus Motif
  VARIANT (1)..(35): Xaa = Any Amino Acid
  VARIANT (2)..(2): Xaa = Any amino acid
  VARIANT (5)..(6): Xaa = Any amino acid
  VARIANT (8)..(14): Xaa = Any amino acid
  VARIANT (15)..(34): Xaa = no amino acid or any amino acid

SEQ ID NO: 109 - protein, 44 aa, Artificial Sequence
  Consensus Motif
  VARIANT (2)..(3): Xaa = any amino acid
  VARIANT (5)..(6): Xaa = any amino acid
  VARIANT (9)..(10): Xaa = any amino acid
  VARIANT (12)..(14): Xaa = any amino acid
  VARIANT (19)..(20): Xaa = any amino acid
  VARIANT (24)..(25): Xaa = any amino acid
  VARIANT (27)..(27): Xaa = any amino acid
  VARIANT (29)..(29): Xaa = any amino acid
  VARIANT (33)..(33): Xaa = any amino acid
  VARIANT (36)..(36): Xaa = any amino acid
  VARIANT (40)..(40): Xaa = any amino acid
QXXEXXIMXXYXXXEPVKXXLFYXXKXGXTSTXESXAFPXWFIA

SEQ ID NO: 110 - protein, 68 aa, Artificial Sequence
  Consensus Motif
  VARIANT (2)..(3): Xaa = any amino acid
  VARIANT (5)..(6): Xaa = any amino acid
  VARIANT (9)..(10): Xaa = any amino acid
  VARIANT (12)..(14): Xaa = any amino acid
  VARIANT (19)..(20): Xaa = any amino acid
  VARIANT (24)..(25): Xaa = any amino acid
  VARIANT (27)..(27): Xaa = any amino acid
  VARIANT (29)..(29): Xaa = any amino acid
  VARIANT (33)..(33): Xaa = any amino acid
  VARIANT (36)..(36): Xaa = any amino acid
  VARIANT (40)..(40): Xaa = any amino acid
  VARIANT (45)..(49): Xaa = any amino acid
  VARIANT (50)..(50): Xaa = no amino acid or any amino acid
  VARIANT (51)..(51): Xaa = any amino acid
  VARIANT (53)..(53): Xaa = any amino acid
  VARIANT (57)..(57): Xaa = any amino acid
  VARIANT (61)..(64): Xaa = any amino acid
  VARIANT (66)..(66): Xaa = any amino acid
QXXEXXIMXXYXXXEPVKXXLFYXXKXGXTSTXESXAFPXWFIAXXXXXXXPXILTXELGXXXXTXFE

SEQ ID NO: 111 - protein, 35 aa, Artificial Sequence; identical to SEQ ID NO: 94
  Consensus Motif
  VARIANT (2)..(2): Xaa = T or E
  VARIANT (5)..(5): Xaa = A or E
  VARIANT (6)..(6): Xaa = any amino acid
  VARIANT (8)..(8): Xaa = any amino acid
  VARIANT (9)..(9): Xaa = W or L
  VARIANT (10)..(14): Xaa = any amino acid
  VARIANT (15)..(34): Xaa = no amino acid or any amino acid

SEQ ID NO: 112 - DNA, 838 bp, Mus Musculus
  CDS (96)..(575)
cgggtcgacccacgcgtccgctgtagtgtgcagacacattcctattcaatcagggtcaatctgcagattggcagctcagaaacaacatcaccataatgaataaggagaaagaactaagagcagcatcaccttcgcttagacatgttcaggatcttagtagtcgtgtgtggatcctgcagaacaatatcctcactgcagtcccaaggaaagagcaaacagttccagtcactattaccttgctcccatgccaatatctggacactcttgagacgaacaggggggatcccacgtacatgggagtgcaaaggccgatgagctgcctgttctgcacaaaggatggggagcagcctgtgctacagcttggggaagggaacataatggaaatgtacaacaaaaaggaacctgtaaaagcctctctcttctatcacaagaagagtggtacaacctctacatttgagtctgcagccttccctggttggttcatcgctgtctgctctaaagggagctgcccactcattctgacccaagaactgggggaaatcttcatcactgacttcgagatgattgtggtacattaaggtttttagacacattgctctgtggcactctctcaagatttcttggattctaacaagaagcaatcaaagacacccctaacaaaatggaagactgaaaagaaagctgagccctccctgggctgtttttccttggtggtgaatcagatgcagaacatcttaccatgttttcatccaaagcatttactgttggtttttacaaggagtgaattttttaaaataaaatcatttatctcatttgaaaaaaaaaaaaaaaaaagggc

SEQ ID NO: 113 - protein, 160 aa, Mus Musculus
MNKEKELRAASPSLRHVQDLSSRVWILQNNILTAVPRKEQTVPVTITLLPCQYLDTLETNRGDPTYMGVQRPMSCLFCTKDGEQPVLQLGEGNIMEMYNKKEPVKASLFYHKKSGTTSTFESAAFPGWFIAVCSKGSCPLILTQELGEIFITDFEMIVVH

SEQ ID NO: 114 - DNA, 480 bp, Mus Musculus
  CDS (1)..(480)
atgaataaggagaaagaactaagagcagcatcaccttcgcttagacatgttcaggatcttagtagtcgtgtgtggatcctgcagaacaatatcctcactgcagtcccaaggaaagagcaaacagttccagtcactattaccttgctcccatgccaatatctggacactcttgagacgaacaggggggatcccacgtacatgggagtgcaaaggccgatgagctgcctgttctgcacaaaggatggggagcagcctgtgctacagcttggggaagggaacataatggaaatgtacaacaaaaaggaacctgtaaaagcctctctcttctatcacaagaagagtggtacaacctctacatttgagtctgcagccttccctggttggttcatcgctgtctgctctaaagggagctgcccactcattctgacccaagaactgggggaaatcttcatcactgacttcgagatgattgtggtacat

SEQ ID NO: 115 - DNA, 1564 bp, Homo Sapiens
  CDS (97)..(393)
ctggtctcaaactcctgactaatgtggtgaaaccccatctctactaaaaatacaaaaattagccgggcataaccacgccgcgcccctccggtcagcatgaggctcctggcggccgcgctgctcctgctgctgctggcgctgtacaccgcgcgtgtggacgggtccaaatgcaagtgctcccggaagggacccaagatccgctacagcgacgtgaagaagctggaaatgaagccaaagtacccgcactgcgaggagaagatggttatcatcaccaccaagagcgtgtccaggtaccgaggtcaggagcactgcctgcaccccaagctgcagagcaccaagcgcttcatcaagtggtacaacgcctggaacgagaagcgcagggtctacgaagaatagggtgaaaaacctcagaagggaaaactccaaaccagttgggagacttgtgcaaaggactttgcagattaaaaaaaaaaaaaaaaaaagcctttctttctcacaggcataagacacaaattatatattgttatgaagcactttttaccaacggtcagtttttacattttatagctgcgtgcgaaaggcttccagatgggagacccatctctcttgtgctccagacttcatcacaggctgctttttatcaaaaaggggaaaactcatgcctttcctttttaaaaaatgcttttttgtatttgtccatacgtcactatacatctgagctttataagcgcccgggaggaacaatgagcttggtggacacatttcattgcagtgttgctccattcctagcttgggaagcttccgcttagaggtcctggcgcctcggcacagctgccacgggctctcctgggcttatggccggtcacagcctcagtgtgactccacagtggcccctgtagccgggcaagcaggagcaggtctctctgcatctgttctctgaggaactcaagtttggttgccagaaaaatgtgcttcattcccccctggttaatttttacacaccctaggaaacatttccaagatcctgtgatggcgagacaaatgatccttaaagaaggtgtggggtctttcccaacctgaggatttctgaaaggttcacaggttcaatatttaatgcttcagaagcatgtgaggttcccaacactgtcagcaaaaaccttaggagaaaacttaaaaatatatgaatacatgcgcaatacacagctacagacacacattctgttgacaagggaaaaccttcaaagcatgtttctttccctcaccacaacagaacatgcagtactaaagcaatatatttgtgattccccatgtaattcttcaatgttaaacagtgcagtcctctttcgaaagctaagatgaccatgcgccctttcctctgtacatatacccttaagaacgccccctccacacactgccccccagtatatgccgcattgtactgctgtgttatatgctatgtacatgtcagaaaccattagcattgcatgcaggtttcatattctttctaagatggaaagtaataaaatatatttgaaatgtaaaaaaaaaaaaaaaaaaaaaaaaa

SEQ ID NO: 116 - protein, 99 aa, Homo Sapiens
MRLLAAALLLLLLALYTARVDGSKCKCSRKGPKIRYSDVKKLEMKPKYPHCEEKMVIITTKSVSRYRGQEHCLHPKLQSTKRFIKWYNAWNEKRRVYEE

SEQ ID NO: 117 - DNA, 300 bp, Homo Sapiens
  CDS (1)..(297)
atgaggctcctggcggccgcgctgctcctgctgctgctggcgctgtacaccgcgcgtgtggacgggtccaaatgcaagtgctcccggaagggacccaagatccgctacagcgacgtgaagaagctggaaatgaagccaaagtacccgcactgcgaggagaagatggttatcatcaccaccaagagcgtgtccaggtaccgaggtcaggagcactgcctgcaccccaagctgcagagcaccaagcgcttcatcaagtggtacaacgcctggaacgagaagcgcagggtctacgaagaatag

SEQ ID NO: 118 - DNA, 1656 bp, Mus Musculus
  CDS (212)..(508)
ggagatcgcagcacccagcgccaagcgcagcgcggcaccgcgacagacggcaggagcacccatcgacgggcgtacgtggagcgagccgagcagagcagagagaggcgtgcttgaaaccgagaaccaagccgggcggcatcccccggccgccgcacgcacaggccggcgccctccttgcctccctgctccccaccgcgcccctccggccagcatgaggctcctggcggccgcgctgctcctgctgctcctggcgctgtgcgcctcgcgcgtggacgggtccaagtgtaagtgttcccggaaggggcccaagatccgctacagcgacgtgaagaagctggaaatgaagccaaagtacccacactgcgaggagaagatggttatcgtcaccaccaagagcatgtccaggtaccggggccaggagcactgcctgcaccctaagctgcagagcaccaaacgcttcatcaagtggtacaatgcctggaacgagaagcgcagggtctacgaagaatagggtggacgatcatggaaagaaaaactccaggccagttgagagacttcagcagaggactttgcagattaaaataaaagccctttctttctcacaagcataagacaaattatatattgctatgaagctcttcttaccagggtcagtttttacattttatagctgtgtgtgaaaggcttccagatgtgagatccagctcgcctgcgcaccagacttcattacaagtggctttttgctgggcggttggcggggggcggggggacctcaagcctttcctttttaaaataaggggttttgtatttgtccatatgtcaccacacatctgagctttataagcgcctgggaggaacagtgagcatggttgagaccgttcacagcactactgctccgctccaggcttacaaagcttccgctcagagagcctggcggctctgcgcagctgccacaggctctcctgggcttatgactggtcagagtttcagtgtgactccactgtggcccctgttgcagggcaattgggagcaggtccttctacatctgtgcctagaggaactcagtctacttaccagaaggagcttcatccccaccccacccccacccgcaccccagctcattcccctgtcacgaccaggcaagtgatccttaaaggagctgggtctttttcttgcaaactgagggtttctgaaaggtcccctgctttggtagaagatgcttctgaggcatccaaagtccccagcagtgtgagaaaatgatgctcgatgttcgggaggacaagggaagatgcaggattagatgcaggacacacagccagagctacacatcctcttggcaatgggagctcccccccccaaagctttgtttctttccctcaccccaacagaaagtgcactccccctcagtgaatacgcaaacagcactgttctctgagttaggatgttaggacgatcctgcgccctgccctctcctgtgtacatattgccttcagtacccctcccccaccccatgccacacactgcccctcattagaggccgcactgtatggctgtgtatctgctatgtaaatgctgagacccctgagtgctgcatgcaggtttcatgttctttctaagatgaaaagagaaagtaataaaatatatttgaagttacca

SEQ ID NO: 119 - protein, 99 aa, Mus Musculus
MRLLAAALLLLLLALCASRVDGSKCKCSRKGPKIRYSDVKKLEMKPKYPHCEEKMVIVTTKSMSRYRGQEHCLHPKLQSTKRFIKWYNAWNEKRRVYEE

SEQ ID NO: 120 - DNA, 300 bp, Mus Musculus
  CDS (1)..(297)
atgaggctcctggcggccgcgctgctcctgctgctcctggcgctgtgcgcctcgcgcgtggacgggtccaagtgtaagtgttcccggaaggggcccaagatccgctacagcgacgtgaagaagctggaaatgaagccaaagtacccacactgcgaggagaagatggttatcgtcaccaccaagagcatgtccaggtaccggggccaggagcactgcctgcaccctaagctgcagagcaccaaacgcttcatcaagtggtacaatgcctggaacgagaagcgcagggtctacgaagaatag

SEQ ID NO: 121 - DNA, 1372 bp, Rattus norvegicus
  CDS (1)..(234)
gggtccaagtgtaagtgttcccggaaggggcccaagatccgctacagcgacgtgaagaagctggaaatgaagccaaagtacccacactgcgaggagaagatggttatcataaccaccaagagcatgtccaggtaccgcggccaggagcactgcctgcatcctaagctgcaaagtaccaagcgcttcatcaaatggtacaacgcctggaacgagaaacgcagggtctacgaagagtagggtggacgatcttggaaagaaaacctccaggccagttgagagacttcagcagaggactttgcagattaaaaataaaagccctttctttctcacaagcataagacaaattatatattgctgtgaagctcttcttaccagggtcagtttttacattttatagctgtgtgcgaaagccttccagatgtgagatccagctctcctgcgtaccagacttcattacaagtggctttttgccgggggttggggggttgggggtgggcccaagcctttcctttttaaaataagggtttttgtatttgtccatatgtcaccacacatctgaactttataagcgcctggaaggagcaatcagtatggttcaggcaattcattgcactgttgctccggtccaggctttcgaagcttcctctcagagagcctggcgcctcggcacagctgccacaggctctcctgggcttatgactggtcaagagtttcggtgtggctccaccatggcccctgttgcagggcaattgggaacaagtccttctgcatctgtgcctagaggaactcaatctacttcccaggatgagcttcatgcccccaccccagccccacccccaccccagctcattcccctatcccaaccaggcaagcgatccttaaaggagctgggtcthtctctcgcaacctmtgagggtttctgaaaggctcactgctttggtagatgatgcttctgaagcatcagaagcccccggcagcgtgagaaaactgtgtggaggaaaaggggaaaattcaggactcaatgcatgacatccagccagagctacacatcctactggcatggggagacccacgtagctctgttcccctcgcccccacagaaagcgcactcccccttcggtgcatatgcaaacagcgaggtcctcttttggagttaggatgaccctgcaccctctcctgtgtacatattgcttcagtacccgcccctgccacacgctgcccctcagtagaggccgcactggacggctgtgaatctgctatgtaagtgctgagattcatgagtgctgcatgcgggtttcatgttctttctaagatgaaaaagaaagtaataaaaatatatttgaakktwmcmaaaaaaaaaaaaaaaaaaaaa

SEQ ID NO: 122 - protein, 78 aa, Rattus norvegicus
GSKCKCSRKGPKIRYSDVKKLEMKPKYPHCEEKMVIITTKSMSRYRGQEHCLHPKLQSTKRFIKWYNAWNEKRRVYEE

SEQ ID NO: 123 - DNA, 237 bp, Rattus norvegicus
  CDS (1)..(234)
gggtccaagtgtaagtgttcccggaaggggcccaagatccgctacagcgacgtgaagaagctggaaatgaagccaaagtacccacactgcgaggagaagatggttatcataaccaccaagagcatgtccaggtaccgcggccaggagcactgcctgcatcctaagctgcaaagtaccaagcgcttcatcaaatggtacaacgcctggaacgagaaacgcagggtctacgaagagtag

SEQ ID NO: 124 - DNA, 1458 bp, Unknown
  Macaque
  CDS (3)..(284)
cggccgcgctactcctgctgctgctggcgctgtacaccgcgcgcgtggacgggtccaaatgcaagtgctcccggaagggacccaagattcgctacagcgacgtgaagaagctggaaatgaagccaaagtacccgcactgcgaggagaagatggttatcatcaccaccaagagcgtgtccaggtaccgaggtcaggagcactgcctgcaccccaagctgcagagcaccaaacgcttcatcaagtggtacaacgcctggaacgagaagcgcagggtctacgaagaatagggtgaaaaatctctgatgggaaaactccagaccagttgggagacttgtgcaaaggactttgcagatttaaaaaaaaaaaaaaaaagcctttctttctcccaggcataagacacaagttatatattgttatgaagcactttttaccaacggtcagtttttacattttatagctgcgtgcgaaaggcttccagatgtgagacccatctctcttgtgctccagacttcatcacaggctgctttttatcgaaaaggggaaaactcatgcctttcctttttaagaaatgcttttttgtatttgtccatatgtcactatacatctgagctttataagcgcccgggaggaacaatgagcttggtggacacatttcattgcagtgttactccattcctagcttgggaagcttccgctcagaggtcctggcgcctcggcacagctgccacgggctctcctgggcttatggccggtcacagcctcagtgtgactctgcagtggcccctgtagccgggcaagcaggagcaggtctctctgcatctgttctttgaggaactcaagtttggttgccagaaaaatgtgcttcattcccccctggttaatttttacacaccctaggaaacatttccaagatcctgtgatggcgagacaaatgatccttaaagaagatgtggggtctttcccaacctgagactttctgaaaggttcacaggttcaatatttaatgcttcagaagcatgtgaggttcccaacactgtcagcaaaaaccttaggagaaaacttaaaaatatatgaatacatgcacaatacacagctacagactcacattctgttgacaagggaaaaccttcaaagcatgtttctctccctcaccacaacggaacatgcagtactaaagcaatatatttgtgattccccatgtaattcttcaatgttaaacagtgcagtcctctttcaaaagctaagatgaccatgcgccctttcctctgtacatatacccttaagaacgccccctccacacactgccctccagtatacgccgcattgtactgctgtgttatatgctacgtacatgtcagaaaccattagcattgcatgcaggtttcatattctttctaagatggaaagtaataaaatatatttgaaatgtaaaaaaaaaaaaaaaaaaaaaaaaaaaaa

SEQ ID NO: 125 - DNA, 20 bp, Artificial Sequence
  Primer
ccaagcgcttcatcaagtgg

SEQ ID NO: 126 - DNA, 21 bp, Artificial Sequence
  Primer
gcagcctgtgatgaagtctgg

SEQ ID NO: 127 - DNA, 24 bp, Artificial Sequence
  Primer
cagcctattcttcgtagaccctgc

SEQ ID NO: 128 - DNA, 478 bp, Artificial Sequence
  Probe
gtccaagtgtaagtgttcccggaaggggcccaagatccgctacagcgacgtgaagaagctggaaatgaagccaaagtacccacactgcgaggagaagatggttatcgtcaccaccaagagcatgtccaggtaccggggccaggagcactgcctgcaccctaagctgcagagcaccaaacgcttcatcaagtggtacaatgcctggaacgagaagcgcagggtctacgaagaatagggtggacgatcatggaaagaaaaactccaggccagttgagagacttcagcagaggactttgcagattaaaataaaagccctttctttctcacaagcataagacaaattatatattgctatgaagctcttcttaccagggtcagtttttacattttatagctgtgtgtgaaaggcttccagatgtgagatccagctcgcctgcgcaccagacttcattacaagtggctttttgctgggcggttg

SEQ ID NO: 129 - DNA, 2050 bp, Homo Sapiens
  CDS (91)..(1176)
cgaggcggggagccgaggccgccgccagcgcgcagggagccccgagcccgagccccgccgcgaggccgttcgccggctgcccgcagcaccatggatctgcacctcttcgactacgccgagccaggcaacttctccgacataagctggccgtgcaacagcagcgactgcatcgtcgtggacaccgtgctgtgccccaacatgcccaacaaaagcgtgctgctgtacacgctgtccttcatttacatcttcatcttcgtgatcggcatgatcgccaactccgtggtggtctgggtgaacatccaggccaagaccaccggctacgacactcactgctacatcctcaacctggccatcgccgacctgtgggtggtcgtcaccatccccgtctgggtggtcagcctcgtgcagcataaccagtggcccatgggggagctcacgtgcaagatcacgcacctcatcttctccatcaacctgttcggcagcatcttcttcctcacgtgcatgagcgtggaccgctacctctccatcacctacttcgccagcacgtcgagccgcaggaagaaggtggttcgccgcgccgtctgtgtcctggtgtggctgctggccttctgcgtgtccctgcccgacacctactacctgaagaccgtcacgtcggcgtccaacaacgagacctactgccgctccttctaccccgagcacagcgtcaaggagtggctcatcagcatggagctggtctcggtggtcctgggcttcgccatccccttctgcgtcatcgccgtcttctactgcctgctggcccgcgccatctccgcgtccagcgaccaggagaagcagagcagccgaaagatcatcttctcctacgtggtggtcttcctcgtgtgctggctcccctaccacgtggtggtgctcctggacatcttctccatccttcactacatccccttcacctgccagctggagaacttcctcttcacggctctgcacgtcacgcagtgcctgtctctggtgcactgctgcgtcaaccccgtgctctatagcttcatcaaccgtaactacagatacgagctgatgaaggccttcatctttaagtactcggccaagacgggtctcaccaagctcatcgatgcctccagggtgtcggagacggagtactccgccttggagcaaaacgccaagtgacaggccccgcggggcctcggggacaagcgtgcgcgcttcctacacggcgctgggttgcatcgtctccaagagttcaagcaaggcgccttggggcttgaggcctgagtcgcgtgaagtggggaagcaggtgccaccgtgggcccttctcctctttgtccggctgccggggtggctgtcacggggccgtcgtgcctgcaggcgtgggccgtgctgcgtgaccctactacttactcgtccaagccggttgccggcgggctcgcctgcacttctgtaaaataggactttctgtgttccctggaggttttacttggtgacttgtatttaagttttaagactttattttctcattatcggcgtaccttataaatgtacttgaaagtttaaatatattttataaaaatcgtatgggcgctgtcacatacgatacatatacatacgctgacatatattcagagcgttgtagttttaactagtttgatttcagttttgactaaggatgacattaattgttagctgttttgaaattttatatatatatataaatataaatataaatatataaatatataaatatatgccggtctgggctgaaatgttttatttacgatagttttatatctgtgtggtgctttgctacctgcatgggatatgggacaagaaggacgctgtaaagcagtttgtgatattaattgtatcgtaaagttacattaaaaatgcgaaacgaagcggaacctctccaggctgcagcgccgcgcacaaagttttgaacagtcttatttcggagagttctctcaatttgtaagttatttttctttttttttttttttaataaagatttgtttttcctaaaaaaggcaaaaaaaaaaaaaaa

SEQ ID NO: 130 - protein, 362 aa, Homo Sapiens
MDLHLFDYAEPGNFSDISWPCNSSDCIVVDTVLCPNMPNKSVLLYTLSFIYIFIFVIGMIANSVVVWVNIQAKTTGYDTHCYILNLAIADLWVVVTIPVWVVSLVQHNQWPMGELTCKITHLIFSINLFGSIFFLTCMSVDRYLSITYFASTSSRRKKVVRRAVCVLVWLLAFCVSLPDTYYLKTVTSASNNETYCRSFYPEHSVKEWLISMELVSVVLGFAIPFCVIAVFYCLLARAISASSDQEKQSSRKIIFSYVVVFLVCWLPYHVVVLLDIFSILHYIPFTCQLENFLFTALHVTQCLSLVHCCVNPVLYSFINRNYRYELMKAFIFKYSAKTGLTKLIDASRVSETEYSALEQNAK

SEQ ID NO: 131 - DNA, 1860 bp, Mus Musculus
  CDS (89)..(1174)
cactgaaggagcctgcagcgctcaccgtcaggaaggcaaaccacagcccaggaagccctgaggtcacttggtcgctctcctcaagaccatggatgtgcacttgtttgactatgcagagcctggcaactactctgacatcaactggccatgtaacagcagcgactgcattgtggtggacactgtgcagtgtcccaccatgcctaacaagaacgtgcttctgtataccctctccttcatctacattttcatcttcgtgatcggcatgattgccaactctgtggtggtctgggtgaatatccaggctaagaccacaggctacgacacgcactgctacatcttgaacctggccattgcagacctgtgggtcgtcatcaccacccccgtctgggtggtcagtctcgtgcagcataaccagtggcccatgggggagctcacatgcaagatcacacacctcattttctccatcaacctctttgggagcatcttcttcctcgcctgcatgagcgtggaccgctatctctccatcacctacttcaccggcacctccagctataagaagaagatggtacgccgtgttgtatgcatcttggtgtggctgctggccttctttgtgtccctgcctgatacctactacctgaaggcggtcacatctgcttccaacaatgagacctactgcaggtccttctaccccgagcacagcatcaaggagtggctgatcggcatggagctggtctctgtcatcttgggctttgctgtccccttcactatcattgcgatcttctacttcctgctcgctagagccatgtcagcatcaggcgaccaggagaagcacagtagccggaagatcatcttctcctacgtggtggtcttcctggtatgttggctgccgtaccattttgtggttctgctggacatcttctccatcttacactacatcccgtttacctgtcagctggagaatgtgctctttacagcgttgcatgtcacccagtgcctgtccttggtgcactgctgtgtcaaccccgtgctctatagcttcatcaaccgcaactacaggtacgagctgatgaaggccttcatcttcaagtactcggccaaaacaggtctcaccaagctcattgatgcctccagagtgtcagagacagagtactctgccctggaacagaacaccaagtgatccatcattctgcagaggtcggggggacacgtgcatgttgcaaatggggcggctgggtcctgtggtttcttcaagaaagcaatgtagctttgggtctggttgcttgagtggtatgaagaggagaaagcatgtgaccatgcttcctgtctctcattctccagccaagatggctgccgcctggatgcccatcctgacagctggcagctggcagcaggcagggctgtgctgtgctgtgctgtgctgcgctgtgctgtgctgtgcagccagagctgcgtatcaaagccagcaccaggacaggctcttatggacatgtgtacagtagaatcttctgtgtttcttcaagtttttacttggtgactttttgtatttaagttttaagactttattttctcactatggatgtaccttataaatgtatttgaaagctaaatatattttaaatattgtatgggaggtgtaaggctgttgtattcagaccatgtaggcctcagattagctggacttgagttttgactaaggatgacattaattgttagctgatttgaaattatatatataaatataaaaatatatataaatttatgccagtctcggctgaaaggttttatttacaatagttttatatctgtgcaatgtttaatgctggcacagcatatgaaacaacaactgcccagcaatgcagt

SEQ ID NO: 132 - protein, 362 aa, Mus Musculus
MDVHLFDYAEPGNYSDINWPCNSSDCIVVDTVQCPTMPNKNVLLYTLSFIYIFIFVIGMIANSVVVWVNIQAKTTGYDTHCYILNLAIADLWVVITTPVWVVSLVQHNQWPMGELTCKITHLIFSINLFGSIFFLACMSVDRYLSITYFTGTSSYKKKMVRRVVCILVWLLAFFVSLPDTYYLKAVTSASNNETYCRSFYPEHSIKEWLIGMELVSVILGFAVPFTIIAIFYFLLARAMSASGDQEKHSSRKIIFSYVVVFLVCWLPYHFVVLLDIFSILHYIPFTCQLENVLFTALHVTQCLSLVHCCVNPVLYSFINRNYRYELMKAFIFKYSAKTGLTKLIDASRVSETEYSALEQNTK

SEQ ID NO: 133 - DNA, 1895 bp, Canis familiaris
  CDS (1)..(1086)
  misc_feature (1)..(1895): n = A,T,C or G
atggatctgcacctcttcgactacncngagccaggnaacttctcggacatcagctggccatgcaacagcagcgactgcatcgtggtggacacggtgatgtgtcccaacatgcccaacaaaagcgtcctgctctacacgctctccttcatttacattttcatcttcgtcatcggcatgattgccaactccgtggtggtctgggtgaatatccaggccaagaccacaggctatgacacgcactgctacatcttgaacctggccattgccgacctgtgggttgtcctcaccatcccagtctgggtggtcagtctcgtgcagcacaaccagtggcccatgggcgagctcacgtgcaaagtcacacacctcatcttctccatcaacctcttcagcngcattttcttcctcacgtgcatgagcgtggaccgctacctctccatcacctacttcaccaacacccccagcagcaggaagaagatggtacgccgtgtcgtctgcatcctggtgtggctgctggccttctgcgtgtctctgcctgacacctactacctgaagaccgtcacgtctgcgtccaacaatgagacctactgccggtccttctaccccgagcacagcatcaaggagtggctgatcggcatggagctggtctccgttgtcttgggctttgccgttcccttctccattatcgctgtcttctacttcctgctggccagagccatctcggcgtccagtgaccaggagaagcacagcagccggaagatcatcttctcctacgtggtggtcttccttgtctgctggntgccctaccacgtggcggtgctgctggacatcttctccatcctgcactacatccctttcacctgccggctggagcacgccctcttcacggccctgcatgtcacacagtgcctgtcgctggtgcactgctgcgtcaaccctgtcctctacagcttcatcaatcgcaactacaggtacgagctgatgaaggccttcatcttcaagtactcggccaaaacagggctcaccaagctcatcgatgcctccagagtntcngagacggagtactcngccttggagcanancnccaaatgatctgccctggagaggctctgggacgggtttacttgtttttgaacagggtgatgggccctatggttttctagagcaaagcaaagtagcttcgggtcttgatgcttgagtagagtgaagaggggagcacgtgccccctgcatccattntctctttctcttgatgacgcagctgtcatttggctgtgcgtgctgacagttttgcaacaggcagagctgtgtcgcacagcagtgctgtgcgtcagagccagctgaggacaggcttgcctggacttctgtaagataggattttctgtgtttcctgaattttttatatggtgatttgtatttaaattttaagactttattttctcactattggtgtaccttataaatgtatttgaaagttaaatatattttaaatattgtttgggaggcatagtgctgacatatattcagagtgttgtagttttaaggttagcgtgactttcagttttgactaaggatgacactaattgttagctgttttgaaattatatatatataaatatataaatatatgccagtcttggctgaaatgttttatttaccatagttttatatctgtgtggtgttttgtaccggcacgggatatggaacgaaaactgctttgtaatgcagtttgtgacattaatagtattgtaaagttacattttaaaataaacaaaaaactgttctggactgcaaatctgcacacacaacgaacagttgcatttcagagagttctctcaatttgtaagttatttttttttaataaagatttttgtttcctaaaaaaaaaaaaaaaaaaaa

SEQ ID NO: 134 - protein, 362 aa, Canis familiaris
  misc_feature (9)..(9): The 'Xaa' at location 9 stands for Thr, Ala, Pro, or Ser.
  misc_feature (131)..(131): The 'Xaa' at location 131 stands for Ser, Gly, Arg, or Cys.
  misc_feature (266)..(266): The 'Xaa' at location 266 stands for Met, Val, or Leu.
  misc_feature (350)..(350): The 'Xaa' at location 350 stands for Ser.
  misc_feature (355)..(355): The 'Xaa' at location 355 stands for Ser.
  misc_feature (359)..(359): The 'Xaa' at location 359 stands for Gln, or His.
  misc_feature (360)..(360): The 'Xaa' at location 360 stands for Asn, Ser, Thr, or Ile.
  misc_feature (361)..(361): The 'Xaa' at location 361 stands for Thr, Ala, Pro, or Ser.
MDLHLFDYXEPGNFSDISWPCNSSDCIVVDTVMCPNMPNKSVLLYTLSFIYIFIFVIGMIANSVVVWVNIQAKTTGYDTHCYILNLAIADLWVVLTIPVWVVSLVQHNQWPMGELTCKVTHLIFSINLFSXIFFLTCMSVDRYLSITYFTNTPSSRKKMVRRVVCILVWLLAFCVSLPDTYYLKTVTSASNNETYCRSFYPEHSIKEWLIGMELVSVVLGFAVPFSIIAVFYFLLARAISASSDQEKHSSRKIIFSYVVVFLVCWXPYHVAVLLDIFSILHYIPFTCRLEHALFTALHVTQCLSLVHCCVNPVLYSFINRNYRYELMKAFIFKYSAKTGLTKLIDASRVXETEYXALEXXXK

SEQ ID NO: 135 - protein, 94 aa, Unknown
  Macaque
AALLLLLLALYTARVDGSKCKCSRKGPKIRYSDVKKLEMKPKYPHCEEKMVIITTKSVSRYRGQEHCLHPKLQSTKRFIKWYNAWNEKRRVYEE

SEQ ID NO: 136 - DNA, 285 bp, Unknown
  Macaque
  CDS (1)..(282)
gccgcgctactcctgctgctgctggcgctgtacaccgcgcgcgtggacgggtccaaatgcaagtgctcccggaagggacccaagattcgctacagcgacgtgaagaagctggaaatgaagccaaagtacccgcactgcgaggagaagatggttatcatcaccaccaagagcgtgtccaggtaccgaggtcaggagcactgcctgcaccccaagctgcagagcaccaaacgcttcatcaagtggtacaacgcctggaacgagaagcgcagggtctacgaagaatag

SEQ ID NO: 137 - DNA, 2570 bp, Homo Sapiens
  CDS (99)..(1388)
gtcgacccacgcgtccgggccgcggcgccgagtcgaacggggagccgagctggagctaccgcggcgcagccaggccggcgaccaccaggggcctgaggatgaagccaagtctgctgtgccggcccctgtcctgcttccttatgctgctgccctggcctctcgccaccctgacatcaacaaccctttggcagtgcccacctggggaggagcccgacctggacccagggcagggcacattatgcaggccctgccccccaggcaccttctcagctgcatggggctccagcccatgccagccccatgcccgttgcagcctttggaggaggctggaggcccaggtgggcatggcaactcgagatacactctgtggagactgctggcctgggtggtttgggccttggggggttccccgcgttccatgtcaaccatgttcctgggcacctctgggtactcatggctgtgatgagtgggggcggcgggcccgacgtggcgtggaggtggcagcaggggccagcagcggtggtgagacacggcagcctgggaacggcacccgggcaggtggcccagaggagacagccgcccagtacgcggtcatcgccatcgtccctgtcttctgcctcatggggctgttgggcatcctggtgtgcaacctcctcaagcggaagggctaccactgcacggcgcacaaggaggtcgggcccggccctggaggtggaggcagtggaatcaaccctgcctaccggactgaggatgccaatgaggacaccattggggtcctggtgcgcttgatcacagagaagaaagagaatgctgcggccctggaggagctgctgaaagagtaccacagcaaacagctggtgcagacgagccacaggcctgtgtccaagctgccgccagcgcccccgaacgtgccacacatctgcccgcaccgccaccatctccacaccgtgcagggcctggcctcgctctctggcccctgctgctcccgctgtagccagaagaagtggcccgaggtgctgctgtcccctgaggctgtagccgccactactcctgttcccagccttctgcctaacccgaccagggttcccaaggccggggccaaggcagggcgtcagggcgagatcaccatcttgtctgtgggcaggttccgcgtggctcgaattcctgagcagcggacaagttcaatggtgtctgaggtgaagaccatcacggaggctgggccctcgtggggtgatctccctgactccccacagcctggcctcccccctgagcagcaggccctgctaggaagtggcggaagccgtacaaagtggctgaagcccccagcagagaacaaggccgaggagaaccgctatgtggtccggctaagtgagagcaacctggtcatctgaggggcggtctagtctaaggacactgcggccctgccctgggaggttccgaaggcttcctggaggaggtggagctgcagctgggactgtgaggaccgagaagcaatggcccagcagacgagacagcaaagaccaaggcctggaggtgggagcgtctgccccagtgaggaggcaggtggccggcgggcactgtgtacaggagcaggctgagccccgcccctggccctgctgccatgttgctcccctgaaggatgccccgacccccgtgcctgccctggctggatcctaggagcccacgggattctctgtatcatcagaggctgggcttggcagaggggaggggcctgtgcccgtcacccctggccccattccttggtaattagccacacccttgcctctgtacagggccctagagcagatgtgcgtccccctcctcttccagcaggtctataaagggaaggggtagcagaaagtcctgggctaggagagtgagtccctgggttctaatcttgggcacatctgtggccatcgctgggtccatttttctgactgtgaagtaaggagagacgtctcagtacccagggcctcttcagctctttgtaggttctgggctgggttgtgggggactggggagctgggctctaccatccctcccattagtagctttatccagccccgtttttgctgcttccagggcctctgccttcaaggcccccatggggctgtccatccatggctctgcctacggaaggggcttaatgcatgtgcctgcccctcccccagctgtttttaatgaaactgaaaaaatagacttgatcccggcaggactgtgatacagagccctagcctgcccagccagccccaagatctcaggagctttagggagaagacttggtggggctggagcacaccttgggcctcagtggtttctgtgtccctgtggtgccagtgcttctgggcagtgcaggcggctgccaggcccagccctgacttccactctggctcagcaacctggttatttatgtggggccgtgcaggcatgggcccactgcctgtccatcctgtttctcttatttattgaaactcaccattgccctatccttgtgtctccacccccttccatgtgttgaataataaaaggtgggaaagtgaaaaaaaaaaaaaaaaaaaaagggcggccgc

SEQ ID NO: 138 - protein, 430 aa, Homo Sapiens
MKPSLLCRPLSCFLMLLPWPLATLTSTTLWQCPPGEEPDLDPGQGTLCRPCPPGTFSAAWGSSPCQPHARCSLWRRLEAQVGMATRDTLCGDCWPGWFGPWGVPRVPCQPCSWAPLGTHGCDEWGRRARRGVEVAAGASSGGETRQPGNGTRAGGPEETAAQYAVIAIVPVFCLMGLLGILVCNLLKRKGYHCTAHKEVGPGPGGGGSGINPAYRTEDANEDTIGVLVRLITEKKENAAALEELLKEYHSKQLVQTSHRPVSKLPPAPPNVPHICPHRHHLHTVQGLASLSGPCCSRCSQKKWPEVLLSPEAVAATTPVPSLLPNPTRVPKAGAKAGRQGEITILSVGRFRVARIPEQRTSSMVSEVKTITEAGPSWGDLPDSPQPGLPPEQQALLGSGGSRTKWLKPPAENKAEENRYVVRLSESNLVI

SEQ ID NO: 139 - DNA, 1290 bp, Homo Sapiens
atgaagccaagtctgctgtgccggcccctgtcctgcttccttatgctgctgccctggcctctcgccaccctgacatcaacaaccctttggcagtgcccacctggggaggagcccgacctggacccagggcagggcacattatgcaggccctgccccccaggcaccttctcagctgcatggggctccagcccatgccagccccatgcccgttgcagcctttggaggaggctggaggcccaggtgggcatggcaactcgagatacactctgtggagactgctggcctgggtggtttgggccttggggggttccccgcgttccatgtcaaccatgttcctgggcacctctgggtactcatggctgtgatgagtgggggcggcgggcccgacgtggcgtggaggtggcagcaggggccagcagcggtggtgagacacggcagcctgggaacggcacccgggcaggtggcccagaggagacagccgcccagtacgcggtcatcgccatcgtccctgtcttctgcctcatggggctgttgggcatcctggtgtgcaacctcctcaagcggaagggctaccactgcacggcgcacaaggaggtcgggcccggccctggaggtggaggcagtggaatcaaccctgcctaccggactgaggatgccaatgaggacaccattggggtcctggtgcgcttgatcacagagaagaaagagaatgctgcggccctggaggagctgctgaaagagtaccacagcaaacagctggtgcagacgagccacaggcctgtgtccaagctgccgccagcgcccccgaacgtgccacacatctgcccgcaccgccaccatctccacaccgtgcagggcctggcctcgctctctggcccctgctgctcccgctgtagccagaagaagtggcccgaggtgctgctgtcccctgaggctgtagccgccactactcctgttcccagccttctgcctaacccgaccagggttcccaaggccggggccaaggcagggcgtcagggcgagatcaccatcttgtctgtgggcaggttccgcgtggctcgaattcctgagcagcggacaagttcaatggtgtctgaggtgaagaccatcacggaggctgggccctcgtggggtgatctccctgactccccacagcctggcctcccccctgagcagcaggccctgctaggaagtggcggaagccgtacaaagtggctgaagcccccagcagagaacaaggccgaggagaaccgctatgtggtccggctaagtgagagcaacctggtcatc

SEQ ID NO: 140 - protein, 408 aa, Homo Sapiens
TLTSTTLWQCPPGEEPDLDPGQGTLCRPCPPGTFSAAWGSSPCQPHARCSLWRRLEAQVGMATRDTLCGDCWPGWFGPWGVPRVPCQPCSWAPLGTHGCDEWGRRARRGVEVAAGASSGGETRQPGNGTRAGGPEETAAQYAVIAIVPVFCLMGLLGILVCNLLKRKGYHCTAHKEVGPGPGGGGSGINPAYRTEDANEDTIGVLVRLITEKKENAAALEELLKEYHSKQLVQTSHRPVSKLPPAPPNVPHICPHRHHLHTVQGLASLSGPCCSRCSQKKWPEVLLSPEAVAATTPVPSLLPNPTRVPKAGAKAGRQGEITILSVGRFRVARIPEQRTSSMVSEVKTITEAGPSWGDLPDSPQPGLPPEQQALLGSGGSRTKWLKPPAENKAEENRYVVRLSESNLVI

SEQ ID NO: 141 - protein, 40 aa, Homo Sapiens
CPDGTYTDSWNHEQCLPCTRCEPMGQYMVQPCTWTQNTVC

SEQ ID NO: 142 - protein, 40 aa, Homo Sapiens
CPPGTFSAAWGSSPCQPHARCSLWRRLEAQVGMATRDTLC

SEQ ID NO: 143 - DNA, 29 bp, Artificial Sequence
  Oligonucleotide
ctggtggtccccggactcctacttcggtt

SEQ ID NO: 144 - DNA, 20 bp, Artificial Sequence
  Oligonucleotide
gactcctacttcggttcaga

SEQ ID NO: 145 - DNA, 5042 bp, Homo Sapiens
  CDS (127)..(3690)
gtcgacccacgcgtccgggcgccccgcgcagtgcaggctgcaggcgccgcgccgaggaggctgccgctctggcttgccgccccccgccgccgctgcacaccggacccagccgccgtgccgcgggccatggacctgcccaggggcctggtggtggcctgggcgctcagcctgtggccagggttcacggacaccttcaacatggacaccaggaagccccgggtcatccctggctccaggaccgccttctttggctacacagtgcagcagcacgacatcagtggcaataagtggctggtcgtgggcgccccactggaaaccaatggctaccagaagacgggagacgtgtacaagtgtccagtgatccacgggaactgcaccaaactcaacctgggaagggtcaccctgtccaacgtgtccgagcggaaagacaacatgcgcctcggccttagtctcgccaccaaccccaaggacaacagcttcctggcctgcagccccctctggtctcatgagtgtgggagctcctactacaccacagggatgtgttcaagagtcaactccaacttcaggttctccaagaccgtggccccagctctccaaaggtgccagacctacatggacatcgtcattgtcctggatggctccaacagcatctacccctgggtggaggttcagcacttcctcatcaacatcctgaaaaagttttacattggcccagggcagatccaggttggagttgtgcagtatggcgaagatgtggtgcatgagtttcacctcaacgactacaggtctgtaaaagatgtggtggaagctgccagccacattgagcagagaggaggaacagagacccggacggcatttggcattgaatttgcacgctcagaggctttccagaagggtggaaggaaaggagccaagaaggtgatgattgtcatcacagatggggagtcccacgacagcccagacctggagaaggtgatccagcaaagcgaaagagacaacgtaacaagatatgcggtggccgtcctgggctactacaaccgcagggggatcaatccagaaacttttctaaatgaaatcaaatacatcgccagtgaccctgatgacaagcacttcttcaatgtcactgatgaggctgccttgaaggacattgtcgatgccctgggggacagaatcttcagcctggaaggcaccaacaagaacgagacctcctttgggctggagatgtcacagacgggcttttcctcgcacgtggtggaggatggggttctgctgggagccgtcggtgcctatgactggaatggagctgtgctaaaggagacgagtgccgggaaggtcattcctctccgcgagtcctacctgaaagagttccccgaggagctcaagaaccatggtgcatacctggggtacacagtcacatcggtcgtgtcctccaggcaggggcgagtgtacgtggccggagccccccggttcaaccacacgggcaaggtcatcctgttcaccatgcacaacaaccggagcctcaccatccaccaggctatgcggggccagcagataggctcttactttgggagtgaaatcacctcggtggacatcgacggcgacggcgtgactgatgtcctgctggtgggcgcacccatgtacttcaacgagggccgtgagcgaggcaaggtgtacgtctatgagctgagacagaaccggtttgtttataacggaacgctaaaggattcacacagttaccagaatgcccgatttgggtcctccattgcctcagttcgagacctcaaccaggattcctacaatgacgtggtggtgggagcccccctggaggacaaccacgcaggagccatctacatcttccacggcttccgaggcagcatcctgaagacacctaagcagagaatcacagcctcagagctggctaccggcctccagtattttggctgcagcatccacgggcaattggacctcaatgaggatgggctcatcgacctggcagtgggagcccttggcaacgctgtgattctgtggtcccgcccagtggttcagatcaatgccagcctccactttgagccatccaagatcaacatcttccacagagactgcaagcgcagtggcagggatgccacctgcctggccgccttcctctgcttcacgcccatcttcctggcaccccatttccaaacaacaactgttggcatcagatacaacgccaccatggatgagaggcggtatacaccgagggcccacctggacgagggcggggaccgattcaccaacagagccgtactgctctcctccggccaggagctctgtgagcggatcaacttccatgtcctggacactgctgactacgtgaagccagtgaccttctcagtcgagtattccctggaggaccctgaccatggccccatgctggacgacggctggcccaccactctcagagtctcggtgcccttctggaacggctgcaatgaggatgagcactgtgtccctgaccttgtgttggatgcccggagtgacctgcccacggccatggagtactgccagagggtgctgaggaagcctgcgcaggactgctccgcatacacgctgtccttcgacaccacagtcttcatcatagagagcacacgccagcgagtggcggtggaggccacactggagaacaggggcgagaacgcctacagcacggtcctaaatatctcgcagtcagcaaacctgcagtttgccagcttgatccagaaggaggactcagacggtagcattgagtgtgtgaacgaggagaggaggctccagaagcaagtctgcaacgtcagctatcccttcttccgggccaaggccaaggtggctttccgtcttgattttgagttcagcaaatccatcttcctacaccacctggagatcgagctcgctgcaggcagtgacagtaatgagcgggacagcaccaaggaagacaacgtggcccccttacgcttccacctcaaatacgaggctgacgtcctcttcaccaggagcagcagcctgagccactacgaggtcaagcccaacagctcgctggagagatacgatggtatcgggcctcccttcagctgcatcttcaggatccagaacttgggcttgttccccatccacgggatgatgatgaagatcaccattcccatcgccaccaggagcggcaaccgcctactgaagctgagggacttcctcacggacgaggcgaacacgtcctgtaacatctggggcaatagcactgagtaccggcccaccccagtggaggaagacttgcgtcgtgctccacagctgaatcacagcaactctgatgtcgtctccatcaactgcaatatacggctggtccccaaccaggaaatcaatttccatctactggggaacctgtggttgaggtccctaaaagcactcaagtacaaatccatgaaaatcatggtcaacgcagccttgcagaggcagttccacagccccttcatcttccgtgaggaggatcccagccgccagatcgtgtttgagatctccaagcaagaggactggcaggtccccatctggatcattgtaggcagcaccctggggggcctcctactgctggccctgctggtcctggcactgtggaagctcggcttctttagaagtgccaggcgcaggagggagcctggtctggaccccacccccaaagtgctggagtgaggctccagaggagactttgagttgatgggggccaggacaccagtccaggtagtgttgagacccaggcctgtggccccaccgagctggagcggagaggaagccagctggctttgcacttgacctcatctcccgagcaatggcgcctgctccctccagaatggaactcaagctggttttaagtggaactgccctactgggagactgggacacctttaacacagacccctagggatttaaagggacacccctacacacacccaggcccacgccaaggcctccctcaggctctgtggagggcatttgctgccccagctactaaggtgctaggaattcgtaatcatccccatcctccagagaaacccagggaggaagactgtaaatacgaacccaatctgcacactccaggcctctagttccagaaggatccaagacaaaacagatctgaattctgcccttttctctcacccatcccacccctccattggctcccaagtcacacccactcccttccccatagataggcccctggggctcctgaagaatgaacccaagagcaagggcttgatggtgacagctgcaagccagggatgaagaaagactctgagatgtggagactgatggccaggcaagtgggaccaggatactggacgctgtcctgagatgagaggtagccgggctctgcacccacgtgcattcacattgaccgcaactcacacattcccccaccagctgcagccccttgctctcagctgccaaccctcccgggtcacttttgttcccaggtacctcatgggaagcatgtggatgacacaatccctggggctgtgcattcccacgtcttcttgctgcagcctgcccctagacatggacgcactggcctggctgcagctgggcagcaggggtaggggtagggagcctcccctccctgtatcaccccctccctacacacacacacacacacacacacacacactgcctcccatccttccctcatgcccgccagtgcacagggaagggcttggccagcgctgttgaggggtcccctctggaatgcactgaataaagcacgtgcaaggactcccggagcctgtgcagccttggtggcaaatatctcatctgccggcccccaggacaagtggtatgaccagtgataatgccccaaggacaaggggcgtgcctggcgcccagtggagtaatttatgccttagtcttgttttgaggtagaaatgcaagggggacacatgaaaggcatcagtccccctgtgcatagtacgacctttactgtcgtatttttgaaaaattaaaaatacagtgtttaaaaacaaaaaaaaaaaaaaaagggcggccgc

SEQ ID NO: 146 - DNA, 3564 bp, Homo Sapiens
  CDS (1)..(3564)
atggacctgcccaggggcctggtggtggcctgggcgctcagcctgtggccagggttcacggacaccttcaacatggacaccaggaagccccgggtcatccctggctccaggaccgccttctttggctacacagtgcagcagcacgacatcagtggcaataagtggctggtcgtgggcgccccactggaaaccaatggctaccagaagacgggagacgtgtacaagtgtccagtgatccacgggaactgcaccaaactcaacctgggaagggtcaccctgtccaacgtgtccgagcggaaagacaacatgcgcctcggccttagtctcgccaccaaccccaaggacaacagcttcctggcctgcagccccctctggtctcatgagtgtgggagctcctactacaccacagggatgtgttcaagagtcaactccaacttcaggttctccaagaccgtggccccagctctccaaaggtgccagacctacatggacatcgtcattgtcctggatggctccaacagcatctacccctgggtggaggttcagcacttcctcatcaacatcctgaaaaagttttacattggcccagggcagatccaggttggagttgtgcagtatggcgaagatgtggtgcatgagtttcacctcaacgactacaggtctgtaaaagatgtggtggaagctgccagccacattgagcagagaggaggaacagagacccggacggcatttggcattgaatttgcacgctcagaggctttccagaagggtggaaggaaaggagccaagaaggtgatgattgtcatcacagatggggagtcccacgacagcccagacctggagaaggtgatccagcaaagcgaaagagacaacgtaacaagatatgcggtggccgtcctgggctactacaaccgcagggggatcaatccagaaacttttctaaatgaaatcaaatacatcgccagtgaccctgatgacaagcacttcttcaatgtcactgatgaggctgccttgaaggacattgtcgatgccctgggggacagaatcttcagcctggaaggcaccaacaagaacgagacctcctttgggctggagatgtcacagacgggcttttcctcgcacgtggtggaggatggggttctgctgggagccgtcggtgcctatgactggaatggagctgtgctaaaggagacgagtgccgggaaggtcattcctctccgcgagtcctacctgaaagagttccccgaggagctcaagaaccatggtgcatacctggggtacacagtcacatcggtcgtgtcctccaggcaggggcgagtgtacgtggccggagccccccggttcaaccacacgggcaaggtcatcctgttcaccatgcacaacaaccggagcctcaccatccaccaggctatgcggggccagcagataggctcttactttgggagtgaaatcacctcggtggacatcgacggcgacggcgtgactgatgtcctgctggtgggcgcacccatgtacttcaacgagggccgtgagcgaggcaaggtgtacgtctatgagctgagacagaaccggtttgtttataacggaacgctaaaggattcacacagttaccagaatgcccgatttgggtcctccattgcctcagttcgagacctcaaccaggattcctacaatgacgtggtggtgggagcccccctggaggacaaccacgcaggagccatctacatcttccacggcttccgaggcagcatcctgaagacacctaagcagagaatcacagcctcagagctggctaccggcctccagtattttggctgcagcatccacgggcaattggacctcaatgaggatgggctcatcgacctggcagtgggagcccttggcaacgctgtgattctgtggtcccgcccagtggttcagatcaatgccagcctccactttgagccatccaagatcaacatcttccacagagactgcaagcgcagtggcagggatgccacctgcctggccgccttcctctgcttcacgcccatcttcctggcaccccatttccaaacaacaactgttggcatcagatacaacgccaccatggatgagaggcggtatacaccgagggcccacctggacgagggcggggaccgattcaccaacagagccgtactgctctcctccggccaggagctctgtgagcggatcaacttccatgtcctggacactgctgactacgtgaagccagtgaccttctcagtcgagtattccctggaggaccctgaccatggccccatgctggacgacggctggcccaccactctcagagtctcggtgcccttctggaacggctgcaatgaggatgagcactgtgtccctgaccttgtgttggatgcccggagtgacctgcccacggccatggagtactgccagagggtgctgaggaagcctgcgcaggactgctccgcatacacgctgtccttcgacaccacagtcttcatcatagagagcacacgccagcgagtggcggtggaggccacactggagaacaggggcgagaacgcctacagcacggtcctaaatatctcgcagtcagcaaacctgcagtttgccagcttgatccagaaggaggactcagacggtagcattgagtgtgtgaacgaggagaggaggctccagaagcaagtctgcaacgtcagctatcccttcttccgggccaaggccaaggtggctttccgtcttgattttgagttcagcaaatccatcttcctacaccacctggagatcgagctcgctgcaggcagtgacagtaatgagcgggacagcaccaaggaagacaacgtggcccccttacgcttccacctcaaatacgaggctgacgtcctcttcaccaggagcagcagcctgagccactacgaggtcaagcccaacagctcgctggagagatacgatggtatcgggcctcccttcagctgcatcttcaggatccagaacttgggcttgttccccatccacgggatgatgatgaagatcaccattcccatcgccaccaggagcggcaaccgcctactgaagctgagggacttcctcacggacgaggcgaacacgtcctgtaacatctggggcaatagcactgagtaccggcccaccccagtggaggaagacttgcgtcgtgctccacagctgaatcacagcaactctgatgtcgtctccatcaactgcaatatacggctggtccccaaccaggaaatcaatttccatctactggggaacctgtggttgaggtccctaaaagcactcaagtacaaatccatgaaaatcatggtcaacgcagccttgcagaggcagttccacagccccttcatcttccgtgaggaggatcccagccgccagatcgtgtttgagatctccaagcaagaggactggcaggtccccatctggatcattgtaggcagcaccctggggggcctcctactgctggccctgctggtcctggcactgtggaagctcggcttctttagaagtgccaggcgcaggagggagcctggtctggaccccacccccaaagtgctggag

SEQ ID NO: 147 - protein, 1188 aa, Homo Sapiens [sequence omitted]

SEQ ID NO: 148 - protein, 1166 aa, Homo Sapiens
FNMDTRKPRVIPGSRTAFFGYTVQQHDISGNKWLVVGAPLETNGYQKTGDVYKCPVIHGNCTKLNLGRVTLSNVSERKDNMRLGLSLATNPKDNSFLACSPLWSHECGSSYYTTGMCSRVNSNFRFSKTVAPALQRCQTYMDIVIVLDGSNSIYPWVEVQHFLINILKKFYIGPGQIQVGVVQYGEDVVHEFHLNDYRSVKDVVEAASHIEQRGGTETRTAFGIEFARSEAFQKGGRKGAKKVMIVITDGESHDSPDLEKVIQQSERDNVTRYAVAVLGYYNRRGINPETFLNEIKYIASDPDDKHFFNVTDEAALKDIVDALGDRIFSLEGTNKNETSFGLEMSQTGFSSHVVEDGVLLGAVGAYDWNGAVLKETSAGKVIPLRESYLKEFPEELKNHGAYLGYTVTSVVSSRQGRVYVAGAPRFNHTGKVILFTMHNNRSLTIHQAMRGQQIGSYFGSEITSVDIDGDGVTDVLLVGAPMYFNEGRERGKVYVYELRQNRFVYNGTLKDSHSYQNARFGSSIASVRDLNQDSYNDVVVGAPLEDNHAGAIYIFHGFRGSILKTPKQRITASELATGLQYFGCSIHGQLDLNEDGLIDLAVGALGNAVILWSRPVVQINASLHFEPSKINIFHRDCKRSGRDATCLAAFLCFTPIFLAPHFQTTTVGIRYNATMDERRYTPRAHLDEGGDRFTNRAVLLSSGQELCERINFHVLDTADYVKPVTFSVEYSLEDPDHGPMLDDGWPTTLRVSVPFWNGCNEDEHCVPDLVLDARSDLPTAMEYCQRVLRKPAQDCSAYTLSFDTTVFIIESTRQRVAVEATLENRGENAYSTVLNISQSANLQFASLIQKEDSDGSIECVNEERRLQKQVCNVSYPFFRAKAKVAFRLDFEFSKSIFLHHLEIELAAGSDSNERDSTKEDNVAPLRFHLKYEADVLFTRSSSLSHYEVKPNSSLERYDGIGPPFSCIFRIQNLGLFPIHGMMMKITIPIATRSGNRLLKLRDFLTDEANTSCNIWGNSTEYRPTPVEEDLRRAPQLNHSNSDVVSINCNIRLVPNQEINFHLLGNLWLRSLKALKYKSMKIMVNAALQRQFHSPFIFREEDPSRQIVFEISKQEDWQVPIWIIVGSTLGGLLLLALLVLALWKLGFFRSARRRREPGLDPTPKVLE

SEQ ID NO: 149 - protein, 22 aa, Homo Sapiens
  SIGNAL (1)..(22)
MDLPRGLVVAWALSLWPGFTDT

SEQ ID NO: 150 - protein, 1141 aa, Homo Sapiens
  SIGNAL (1)..(22)
MDLPRGLVVAWALSLWPGFTDTFNMDTRKPRVIPGSRTAFFGYTVQQHDISGNKWLVVGAPLETNGYQKTGDVYKCPVIHGNCTKLNLGRVTLSNVSERKDNMRLGLSLATNPKDNSFLACSPLWSHECGSSYYTTGMCSRVNSNFRFSKTVAPALQRCQTYMDIVIVLDGSNSIYPWVEVQHFLINILKKFYIGPGQIQVGVVQYGEDVVHEFHLNDYRSVKDVVEAASHIEQRGGTETRTAFGIEFARSEAFQKGGRKGAKKVMIVITDGESHDSPDLEKVIQQSERDNVTRYAVAVLGYYNRRGINPETFLNEIKYIASDPDDKHFFNVTDEAALKDIVDALGDRIFSLEGTNKNETSFGLEMSQTGFSSHVVEDGVLLGAVGAYDWNGAVLKETSAGKVIPLRESYLKEFPEELKNHGAYLGYTVTSVVSSRQGRVYVAGAPRFNHTGKVILFTMHNNRSLTIHQAMRGQQIGSYFGSEITSVDIDGDGVTDVLLVGAPMYFNEGRERGKVYVYELRQNRFVYNGTLKDSHSYQNARFGSSIASVRDLNQDSYNDVVVGAPLEDNHAGAIYIFHGFRGSILKTPKQRITASELATGLQYFGCSIHGQLDLNEDGLIDLAVGALGNAVILWSRPVVQINASLHFEPSKINIFHRDCKRSGRDATCLAAFLCFTPIFLAPHFQTTTVGIRYNATMDERRYTPRAHLDEGGDRFTNRAVLLSSGQELCERINFHVLDTADYVKPVTFSVEYSLEDPDHGPMLDDGWPTTLRVSVPFWNGCNEDEHCVPDLVLDARSDLPTAMEYCQRVLRKPAQDCSAYTLSFDTTVFIIESTRQRVAVEATLENRGENAYSTVLNISQSANLQFASLIQKEDSDGSIECVNEERRLQKQVCNVSYPFFRAKAKVAFRLDFEFSKSIFLHHLEIELAAGSDSNERDSTKEDNVAPLRFHLKYEADVLFTRSSSLSHYEVKPNSSLERYDGIGPPFSCIFRIQNLGLFPIHGMMMKITIPIATRSGNRLLKLRDFLTDEANTSCNIWGNSTEYRPTPVEEDLRRAPQLNHSNSDVVSINCNIRLVPNQEINFHLLGNLWLRSLKALKYKSMKIMVNAALQRQFHSPFIFREEDPSRQIVFEISKQEDWQVP

SEQ ID NO: 151 - protein, 182 aa, Homo Sapiens
DIVIVLDGSNSIYPWVEVQHFLINILKKFYIGPGQIQVGVVQYGEDVVHEFHLNDYRSVKDVVEAASHIEQRGGTETRTAFGIEFARSEAFQKGGRKGAKKVMIVITDGESHDSPDLEKVIQQSERDNVTRYAVAVLGYYNRRGINPETFLNEIKYIASDPDDKHFFNVTDEAALKDIVDAL

SEQ ID NO: 152 - protein, 36 aa, Homo Sapiens
AFFGYTVQQHDISGNKWLVVGAPLETNGYQKTGDVY

SEQ ID NO: 153 - protein, 43 aa, Homo Sapiens
DNSFLACSPLWSHECGSSYYTTGMCSRVNSNFRFSKTVAPALQ

SEQ ID NO: 154 - protein, 26 aa, Homo Sapiens
SQTGFSSHVVEDGVLLGAVGAYDWNG

SEQ ID NO: 155 - protein, 35 aa, Homo Sapiens
HGAYLGYTVTSVVSSRQGRVYVAGAPRFNHTGKVI

SEQ ID NO: 156 - protein, 39 aa, Homo Sapiens
SYFGSEITSVDIDGDGVTDVLLVGAPMYFNEGRERGKVY

SEQ ID NO: 157 - protein, 36 aa, Homo Sapiens
ARFGSSIASVRDLNQDSYNDVVVGAPLEDNHAGAIY

SEQ ID NO: 158 - protein, 39 aa, Homo Sapiens
QYFGCSIHGQLDLNEDGLIDLAVGALGNAVILWSRPVVQ

SEQ ID NO: 159 - protein, 23 aa, Homo Sapiens
IWIIVGSTLGGLLLLALLVLALW

SEQ ID NO: 160 - protein, 24 aa, Homo Sapiens
KLGFFRSARRRREPGLDPTPKVLE

SEQ ID NO: 161 - DNA, 3884 bp, Homo Sapiens
  CDS (22)..(3522)
caggtcagaaaccgatcaggcatggaactccccttcgtcactcacctgttcttgcccctggtgttcctgacaggtctctgctccccctttaacctggatgaacatcacccacgcctattcccagggccaccagaagctgaatttggatacagtgtcttacaacatgttgggggtggacagcgatggatgctggtgggcgccccctgggatgggccttcaggcgaccggaggggggacgtttatcgctgccctgtagggggggcccacaatgccccatgtgccaagggccacttaggtgactaccaactgggaaattcatctcatcctgctgtgaatatgcacctggggatgtctctgttagagacagatggtgatgggggattcatggcctgtgcccctctctggtctcgtgcttgtggcagctctgtcttcagttctgggatatgtgcccgtgtggatgcttcattccagcctcagggaagcctggcacccactgcccaacgctgcccaacatacatggatgttgtcattgtcttggatggctccaacagcatctacccctggtctgaagttcagaccttcctacgaagactggtagggaaactgtttattgacccagaacagatacaggtgggactggtacagtatggggagagccctgtacatgagtggtccctgggagatttccgaacgaaggaagaagtggtgagagcagcaaagaacctcagtcggcgggagggacgagaaacaaagactgcccaagcaataatggtggcctgcacagaagggttcagtcagtcccatgggggccgacccgaggctgccaggctactggtggttgtcactgatggagagtcccatgatggagaggagcttcctgcagcactaaaggcctgtgaggctggaagagtgacacgctatgggattgcagtccttggtcactacctccggcggcagcgagatcccagctctttcctgagagaaattagaactattgccagtgatccagatgagcgattcttcttcaatgtcacagatgaggctgctctgactgacattgtggatgcactaggagatcggatttttggccttgaagggtcccatgcagaaaacgaaagctcctttgggctggaaatgtctcagattggtttctccactcatcggctaaaggatgggattctttttgggatggtgggggcctatgactggggaggctctgtgctatggcttgaaggaggccaccgccttttccccccacgaatggcactggaagacgagttcccccctgcactgcagaaccatgcagcctacctgggttactctgtttcttccatgcttttgcggggtggacgccgcctgtttctctctggggctcctcgatttagacatcgaggaaaagtcatcgccttccagcttaagaaagatggggctgtgagggttgcccagagcctccagggggagcagattggttcatactttggcagtgagctctgcccattggatacagatagggatggaacaactgatgtcttacttgtggctgcccccatgttcctgggaccccagaacaaggaaacaggacgtgtttatgtgtatctggtaggccagcagtccttgctgaccctccaaggaacacttcagccagaacccccccaggatgctcggtttggctttgccatgggagctcttcctgatctgaaccaagatggttttgctgatgtggctgtgggggcgcctctggaagatgggcaccagggagcactgtacctgtaccatggaacccagagtggagtcaggccccatcctgcccagaggattgctgctgcctccatgccacatgccctcagctactttggccgaagtgtggatggtcggctagatctggatggagatgatctggtcgatgtggctgtgggtgcccagggggcagccatcctgctcagctcccggcccattgtccatctgaccccatcactggaggtgaccccacaggccatcagtgtggttcagagggactgtaggcggcgaggccaagaagcagtctgtctgactgcagccctttgcttccaagtgacctcccgtactcctggtcgctgggatcaccaattctacatgaggttcaccgcatcactggatgaatggactgctggggcacgtgcagcatttgatggctctggccagaggttgtcccctcggaggctccggctcagtgtggggaatgtcacttgtgagcagctacacttccatgtgctggatacatcagattacctccggccagtggccttgactgtgacctttgccttggacaatactacaaagccagggcctgtgctgaatgagggctcacccacctctatacaaaagctggtccccttctcaaaggattgtggccctgacaatgaatgtgtcacagacctggtgcttcaagtgaatatggacatcagaggctccaggaaggccccatttgtggttcgaggtggccggcggaaagtgctggtatctacaactctggagaacagaaaggaaaatgcttacaatacgagcctgagtatcatcttctctagaaacctccacctggccagtctcactcctcagagagagagcccaataaaggtggaatgtgccgccccttctgctcatgcccggctctgcagtgtggggcatcctgtcttccagactggagccaaggtgacctttctgctagagtttgagtttagctgctcctctctcctgagccaggtctttgggaagctgactgccagcagtgacagcctggagagaaatggcacccttcaagaaaacacagcccagacctcagcctacatccaatatgagccccacctcctgttctctagtgagtctaccctgcaccgctatgaggttcacccatatgggaccctcccagtgggtcctggcccagaattcaaaaccactctcagggttcagaacctaggctgctatgtggtcagtggcctcatcatctcagccctccttccagctgtggcccatgggggcaattacttcctatcactgtctcaagtcatcactaacaatgcaagctgcatagtgcagaacctgactgaacccccaggcccacctgtgcatccagaggagcttcaacacacaaacagactgaatgggagcaatactcagtgtcaggtggtgaggtgccaccttgggcagctggcaaaggggactgaggtctctgttggactattgaggctggttcacaatgaatttttccgaagagccaagttcaagtccctgacggtggtcagcacctttgagctgggaaccgaagagggcagtgtcctacagctgactgaagcctcccgttggagtgagagcctcttggaggtggttcagacccggcctatcctcatctccctgtggatcctcataggcagtgtcctgggagggttgctcctgcttgctctccttgtcttctgcctgtggaagcttggcttctttgcccataagaaaatccctgaggaagaaaaaagagaagagaagttggagcaatgaatgtagaataagggtctagaaagtcctccctggcagctttcttcaagagacttgcataaaagcagaggtttgggggctcagatgggacaagaagccgcctctggactatctccccagaccagcagcctgacttgacttttgagtcctagggatgctgctggctagagatgaggctttacctcagacaagaagagctggcaccaaaactagccatgctcccaccctctgcttccctcctcctcgtgatcctggttccatagccaacactggggcttttgtttggggtccttttatccccaggaatcaataatttttttgcctaggaaaaaaaaaagcggccgcgaattcgatatcaagct

SEQ ID NO: 162 - protein, 1167 aa, Homo Sapiens
MELPFVTHLFLPLVFLTGLCSPFNLDEHHPRLFPGPPEAEFGYSVLQHVGGGQRWMLVGAPWDGPSGDRRGDVYRCPVGGAHNAPCAKGHLGDYQLGNSSHPAVNMHLGMSLLETDGDGGFMACAPLWSRACGSSVFSSGICARVDASFQPQGSLAPTAQRCPTYMDVVIVLDGSNSIYPWSEVQTFLRRLVGKLFIDPEQIQVGLVQYGESPVHEWSLGDFRTKEEVVRAAKNLSRREGRETKTAQAIMVACTEGFSQSHGGRPEAARLLVVVTDGESHDGEELPAALKACEAGRVTRYGIAVLGHYLRRQRDPSSFLREIRTIASDPDERFFFNVTDEAALTDIVDALGDRIFGLEGSHAENESSFGLEMSQIGFSTHRLKDGILFGMVGAYDWGGSVLWLEGGHRLFPPRMALEDEFPPALQNHAAYLGYSVSSMLLRGGRRLFLSGAPRFRHRGKVIAFQLKKDGAVRVAQSLQGEQIGSYFGSELCPLDTDRDGTTDVLLVAAPMFLGPQNKETGRVYVYLVGQQSLLTLQGTLQPEPPQDARFGFAMGALPDLNQDGFADVAVGAPLEDGHQGALYLYHGTQSGVRPHPAQRIAAASMPHALSYFGRSVDGRLDLDGDDLVDVAVGAQGAAILLSSRPIVHLTPSLEVTPQAISVVQRDCRRRGQEAVCLTAALCFQVTSRTPGRWDHQFYMRFTASLDEWTAGARAAFDGSGQRLSPRRLRLSVGNVTCEQLHFHVLDTSDYLRPVALTVTFALDNTTKPGPVLNEGSPTSIQKLVPFSKDCGPDNECVTDLVLQVNMDIRGSRKAPFVVRGGRRKVLVSTTLENRKENAYNTSLSIIFSRNLHLASLTPQRESPIKVECAAPSAHARLCSVGHPVFQTGAKVTFLLEFEFSCSSLLSQVFGKLTASSDSLERNGTLQENTAQTSAYIQYEPHLLFSSESTLHRYEVHPYGTLPVGPGPEFKTTLRVQNLGCYVVSGLIISALLPAVAHGGNYFLSLSQVITNNASCIVQNLTEPPGPPVHPEELQHTNRLNGSNTQCQVVRCHLGQLAKGTEVSVGLLRLVHNEFFRRAKFKSLTVVSTFELGTEEGSVLQLTEASRWSESLLEVVQTRPILISLWILIGSVLGGLLLLALLVFCLWKLGFFAHKKIPEEEKREEKLEQ

SEQ ID NO: 163 - DNA, 4858 bp, Mus Musculus
  CDS (28)..(3591)
gcgacacccgccgccgcgcagcgggccatggactttcccaggggcctcctggtggcctggaccctcagcctttggccaggattcacggacaccttcaatatggataccagaaatccccgggtcattgctggtcccagtgctgccttctttggctacacagtacagcagcatgatatcagtggcaagaagtggttggttgtgggtgccccaatggaaaccaatggccatcagaagacaggagacgtatacaaatgtccggtaacccagggcaactgcaccaagctcaacctgggcagggtcactctgtccaatgtgtctgagaggaaggacaacatgcgcctcggcctgagccttgccaccaaccccaaggacaacagcttcctggcctgcagccctctctggtcgcacgagtgtggaagctcctactacaccactggcatgtgctcacgggtcaactccaacttcagattctctaagacggtagctccggcacttcagaggtgccagacttacatggacatcgtcattgtcttagatggctccaacagcatctacccctgggtggaggtccaacacttcctcatcaatatcctcaaaaagttctacattggccccggccagatccaggtcggaatagtccagtatggagaagatgccgtccatgagttccaccttaatgactacaggtctgtaaaagatgtggtggaagccgccagccacattgagcagagaggagggacagagacccgcacggcatttggcattgaatttgcacgctcggaggctttccagaagggtggaagaaaaggggccaagaaagtgatgattgtcatcacggacggggaatcccacgacagcccagacctggagaaggtgatccggcagagcgagaaggacaacgtgaccagatacgctgtggccgttttgggctactacaaccgcagggggatcaatccagagacttttctaaatgaaatcaaatacatcgccagcgaccctgacgacaagcacttcttcaacgtcacagatgaggcggccctgaaggacattgttgatgcccttggggacaggatcttcagcttggaaggcaccaacaagaatgagacctcttttgggctggagatgtcgcagactggcttttcttcacatgtggtagaggatgggatcctgctgggagctgtgggagcctatgactggaacggggcggtgctgaaggagacaagtgctggcaaggtgattcctcaccgagagtcctaccttaaggagtttccagaggagctgaagaaccatgcagcatacctagggtacacggtgacgtcggttgtgtcctccaggcaggggcgggtgtatgtggctggagcccccagattcaaccatactggcaaggtcattctattcagcatgcacaacaaccggagcctcaccatccaccaggctcttcggggcgagcagataggctcctactttgggagtgagattacctcagtggacgtcaatgatgacagagtgacagatgtgctgctggtgggtgcacccatgtacttcagcgagggccgagagcgaggcaaggtgtatgtctacaacctgagacagaaccggtttgtttataatggcactctgaaggattcccacagctaccagaacgcccggttcgggtcctgcatcgcctctgttcaagacctcaaccaagattcctacaatgatgtggtggtgggggcccctctggaggacagccacagaggggccatctacatcttccatggcttccaaaccaatatcctgaagaagcccatgcagagaataacagcctcggagctggctcctggcctgcagcattttggctgcagcatccacggacaactggacctcaatgaggatgggcttgtggacctagcagtgggcgccctgggcaacgctgtggttttgtgggcccgccctgtagttcaaatcaacgccagcctccactttgagccttccaagatcaacatcttccacaaggactgcaagcgcaatggcagggatgccacctgcctggccgccttcctctgcttcatacccatcttcctggcaccccacttccaaacagcaaccgtcggcatcaggtacaatgcaaccatggatgagaggcggtatatgccgcgggcacatctggacgagggcggagaccagttcaccaacagagccgtcctgctctcctctggccaggaacactgtcaaaggatcaacttccatgtcctggacactgcagactacgtgaagccagtggccttctccgtggagtactccctagaggaccctgacaacggccccatgctggacaacggctggcccactacgctcagagtgtcggtgcccttctggaatggctgtaatgaggatgaacactgtgtccctgaccttgtactggatgctcggagtgacctgcccactgccatggagtactgccagcgggtgctggggaggccggcgcaggactgctccagctacaccctgtccttcgacaccactgtcttcatcatagagagcacgcgccgccgggtggcagtggaggccacgctggagaacagaggagagaatgcttacagcgccgtcctcaacatctcccagtcagagaaccttcagtttgccagcctgatccagaaggatgactcagacaacagcatcgagtgtgtgaacgaggagaggcggcttcacaagaaagtctgcaacgtcagctaccccttcttcagagccaaggccaaggtggctttccgtctggatttcgagttcagcaagtctgtgtttctgcaccatcttcagatccatctgggtgccggcagtgacagtcacgagcaagacagcaccgcagacgataacacggccctcctgcgcttccacctcaaatatgaagcagacgtcctctttaccagaagcagcagcctgagccacttcgaggtcaaggcaaacagctcacttgagagctatgatggcatcggacctccgttcaactgtgttttcaaggtgcagaacctgggctttttccccatccacggggtgatgatgaagatcactgtgcccatcgccaccaggggtggcaaccgcctgctgatgttgagggacttcttcaccgaccagggcaacacatcctgtaacatctgggggaacagcacagagtacaggagtaccccaactgaggaagatctgagccatgccccacagaggaatcacagcaactccgacgtggtctccatcatctgcaacctgaggctggcccccagccaggagaccagcttctacctggtgggaaacctgtggctgacatctctgaaagcactcaagtacaggtctctgaagatcacagtcaacgccgccttgcagaggcagttccacagccccttcatcttccgagaggaagaccctagccgccaggtcacatttgagatctccaagcaagaagactggcaggtccccatctggatcatcgtgggcagcactctggggggcctcttgctgctggccctgctggtcctggcactgtggaagctcggtttttttaaaagtgccaagcgcaagagggaacctggcctaggccccatccccaaagagctcaagtgaggatccagaggaagcttcaagttgttgggggcccgacaccagtccgggggtgtgcaggcccgggctatggcctcagagctggagcaaagaggacacccatggactttacattgagttcatctctggagcaatggcaactgatcgctgtgggatggacctccagcccgtgttcggagtgacttctctactagaggccaagacctccagtacagatccctaaggactaaaagggaccctccaagacccaccggtggccttcccccaaggctctgtggagggaatctgctgccccaaacactaaggtgctagggttttgttgtcttgcccacctctgaagaaactcaaggggaagctagcaaatacgagcccactgtgcacgccctatctggacctatagcttcaggactccatggcccgggagcataacctccgccgcaccccttacccttgctcttggttcccaaaccacagccatcccttctccacagatagaccccaaagatctctatgagtgacccagagttgtgtggcttgatatgccagctgcaggccagtgatggaaacacatccagggactgtgccaaatgaactggagggaatcaggatgctgggtaccttccaaacatcagaaagcagcagggctctccagcagtaaccaccacccactcaatcctgctctccagcctcccccgcagctcctctcagccgctttggttgctaggcaactcgtgctagggagcctgaggaggatgataaaaatccgtggctctccgtaccctcttgtctgacaactgcagcttgtccctggtagatgcactgtgatagggagcctctgtttcttacatcagcacctacacacacacacacacacacacacacacacacacacacacacacacacacgcacgcacctcccaaccatcagcgtgtgggagaagggctcctgtagggggcgctgtggggggccttctaggcatgcactgaacaaagcccatgcaaggcccctgggaaccttaaacctcagaggcagataggcatctcgccggccagctctgggataagccccaaggacaaggggcatgccggatgcccagcagagtaatttatgccttaaccttttgttgagatggaaatggacacatcagtgtcccctgtcatctgtttcatctgaacaatgtcatctgttcccctatgcggtacgacctttactgtcagaaatatatttaagaaaatgttctaaaaaaaaaaaaaaaagggcggccgc

SEQ ID NO: 164 - DNA, 3564 bp, Mus Musculus
  CDS (1)..(3564)
atggactttcccaggggcctcctggtggcctggaccctcagcctttggccaggattcacggacaccttcaatatggataccagaaatccccgggtcattgctggtcccagtgctgccttctttggctacacagtacagcagcatgatatcagtggcaagaagtggttggttgtgggtgccccaatggaaaccaatggccatcagaagacaggagacgtatacaaatgtccggtaacccagggcaactgcaccaagctcaacctgggcagggtcactctgtccaatgtgtctgagaggaaggacaacatgcgcctcggcctgagccttgccaccaaccccaaggacaacagcttcctggcctgcagccctctctggtcgcacgagtgtggaagctcctactacaccactggcatgtgctcacgggtcaactccaacttcagattctctaagacggtagctccggcacttcagaggtgccagacttacatggacatcgtcattgtcttagatggctccaacagcatctacccctgggtggaggtccaacacttcctcatcaatatcctcaaaaagttctacattggccccggccagatccaggtcggaatagtccagtatggagaagatgccgtccatgagttccaccttaatgactacaggtctgtaaaagatgtggtggaagccgccagccacattgagcagagaggagggacagagacccgcacggcatttggcattgaatttgcacgctcggaggctttccagaagggtggaagaaaaggggccaagaaagtgatgattgtcatcacggacggggaatcccacgacagcccagacctggagaaggtgatccggcagagcgagaaggacaacgtgaccagatacgctgtggccgttttgggctactacaaccgcagggggatcaatccagagacttttctaaatgaaatcaaatacatcgccagcgaccctgacgacaagcacttcttcaacgtcacagatgaggcggccctgaaggacattgttgatgcccttggggacaggatcttcagcttggaaggcaccaacaagaatgagacctcttttgggctggagatgtcgcagactggcttttcttcacatgtggtagaggatgggatcctgctgggagctgtgggagcctatgactggaacggggcggtgctgaaggagacaagtgctggcaaggtgattcctcaccgagagtcctaccttaaggagtttccagaggagctgaagaaccatgcagcatacctagggtacacggtgacgtcggttgtgtcctccaggcaggggcgggtgtatgtggctggagcccccagattcaaccatactggcaaggtcattctattcagcatgcacaacaaccggagcctcaccatccaccaggctcttcggggcgagcagataggctcctactttgggagtgagattacctcagtggacgtcaatgatgacagagtgacagatgtgctgctggtgggtgcacccatgtacttcagcgagggccgagagcgaggcaaggtgtatgtctacaacctgagacagaaccggtttgtttataatggcactctgaaggattcccacagctaccagaacgcccggttcgggtcctgcatcgcctctgttcaagacctcaaccaagattcctacaatgatgtggtggtgggggcccctctggaggacagccacagaggggccatctacatcttccatggcttccaaaccaatatcctgaagaagcccatgcagagaataacagcctcggagctggctcctggcctgcagcattttggctgcagcatccacggacaactggacctcaatgaggatgggcttgtggacctagcagtgggcgccctgggcaacgctgtggttttgtgggcccgccctgtagttcaaatcaacgccagcctccactttgagccttccaagatcaacatcttccacaaggactgcaagcgcaatggcagggatgccacctgcctggccgccttcctctgcttcatacccatcttcctggcaccccacttccaaacagcaaccgtcggcatcaggtacaatgcaaccatggatgagaggcggtatatgccgcgggcacatctggacgagggcggagaccagttcaccaacagagccgtcctgctctcctctggccaggaacactgtcaaaggatcaacttccatgtcctggacactgcagactacgtgaagccagtggccttctccgtggagtactccctagaggaccctgacaacggccccatgctggacaacggctggcccactacgctcagagtgtcggtgcccttctggaatggctgtaatgaggatgaacactgtgtccctgaccttgtactggatgctcggagtgacctgcccactgccatggagtactgccagcgggtgctggggaggccggcgcaggactgctccagctacaccctgtccttcgacaccactgtcttcatcatagagagcacgcgccgccgggtggcagtggaggccacgctggagaacagaggagagaatgcttacagcgccgtcctcaacatctcccagtcagagaaccttcagtttgccagcctgatccagaaggatgactcagacaacagcatcgagtgtgtgaacgaggagaggcggcttcacaagaaagtctgcaacgtcagctaccccttcttcagagccaaggccaaggtggctttccgtctggatttcgagttcagcaagtctgtgtttctgcaccatcttcagatccatctgggtgccggcagtgacagtcacgagcaagacagcaccgcagacgataacacggccctcctgcgcttccacctcaaatatgaagcagacgtcctctttaccagaagcagcagcctgagccacttcgaggtcaaggcaaacagctcacttgagagctatgatggcatcggacctccgttcaactgtgttttcaaggtgcagaacctgggctttttccccatccacggggtgatgatgaagatcactgtgcccatcgccaccaggggtggcaaccgcctgctgatgttgagggacttcttcaccgaccagggcaacacatcctgtaacatctgggggaacagcacagagtacaggagtaccccaactgaggaagatctgagccatgccccacagaggaatcacagcaactccgacgtggtctccatcatctgcaacctgaggctggcccccagccaggagaccagcttctacctggtgggaaacctgtggctgacatctctgaaagcactcaagtacaggtctctgaagatcacagtcaacgccgccttgcagaggcagttccacagccccttcatcttccgagaggaagaccctagccgccaggtcacatttgagatctccaagcaagaagactggcaggtccccatctggatcatcgtgggcagcactctggggggcctcttgctgctggccctgctggtcctggcactgtggaagctcggtttttttaaaagtgccaagcgcaagagggaacctggcctaggccccatccccaaagagctcaag

SEQ ID NO: 165 - protein, 1188 aa, Mus Musculus
MDFPRGLLVAWTLSLWPGFTDTFNMDTRNPRVIAGPSAAFFGYTVQQHDISGKKWLVVGAPMETNGHQKTGDVYKCPVTQGNCTKLNLGRVTLSNVSERKDNMRLGLSLATNPKDNSFLACSPLWSHECGSSYYTTGMCSRVNSNFRFSKTVAPALQRCQTYMDIVIVLDGSNSIYPWVEVQHFLINILKKFYIGPGQIQVGIVQYGEDAVHEFHLNDYRSVKDVVEAASHIEQRGGTETRTAFGIEFARSEAFQKGGRKGAKKVMIVITDGESHDSPDLEKVIRQSEKDNVTRYAVAVLGYYNRRGINPETFLNEIKYIASDPDDKHFFNVTDEAALKDIVDALGDRIFSLEGTNKNETSFGLEMSQTGFSSHVVEDGILLGAVGAYDWNGAVLKETSAGKVIPHRESYLKEFPEELKNHAAYLGYTVTSVVSSRQGRVYVAGAPRFNHTGKVILFSMHNNRSLTIHQALRGEQIGSYFGSEITSVDVNDDRVTDVLLVGAPMYFSEGRERGKVYVYNLRQNRFVYNGTLKDSHSYQNARFGSCIASVQDLNQDSYNDVVVGAPLEDSHRGAIYIFHGFQTNILKKPMQRITASELAPGLQHFGCSIHGQLDLNEDGLVDLAVGALGNAVVLWARPVVQINASLHFEPSKINIFHKDCKRNGRDATCLAAFLCFIPIFLAPHFQTATVGIRYNATMDERRYMPRAHLDEGGDQFTNRAVLLSSGQEHCQRINFHVLDTADYVKPVAFSVEYSLEDPDNGPMLDNGWPTTLRVSVPFWNGCNEDEHCVPDLVLDARSDLPTAMEYCQRVLGRPAQDCSSYTLSFDTTVFIIESTRRRVAVEATLENRGENAYSAVLNISQSENLQFASLIQKDDSDNSIECVNEERRLHKKVCNVSYPFFRAKAKVAFRLDFEFSKSVFLHHLQIHLGAGSDSHEQDSTADDNTALLRFHLKYEADVLFTRSSSLSHFEVKANSSLESYDGIGPPFNCVFKVQNLGFFPIHGVMMKITVPIATRGGNRLLMLRDFFTDQGNTSCNIWGNSTEYRSTPTEEDLSHAPQRNHSNSDVVSIICNLRLAPSQETSFYLVGNLWLTSLKALKYRSLKITVNAALQRQFHSPFIFREEDPSRQVTFEISKQEDWQVPIWIIVGSTLGGLLLLALLVLALWKLGFFKSAKRKREPGLGPIPKELK

SEQ ID NO: 166 - protein, 1166 aa, Mus Musculus
FNMDTRNPRVIAGPSAAFFGYTVQQHDISGKKWLVVGAPMETNGHQKTGDVYKCPVTQGNCTKLNLGRVTLSNVSERKDNMRLGLSLATNPKDNSFLACSPLWSHECGSSYYTTGMCSRVNSNFRFSKTVAPALQRCQTYMDIVIVLDGSNSIYPWVEVQHFLINILKKFYIGPGQIQVGIVQYGEDAVHEFHLNDYRSVKDVVEAASHIEQRGGTETRTAFGIEFARSEAFQKGGRKGAKKVMIVITDGESHDSPDLEKVIRQSEKDNVTRYAVAVLGYYNRRGINPETFLNEIKYIASDPDDKHFFNVTDEAALKDIVDALGDRIFSLEGTNKNETSFGLEMSQTGFSSHVVEDGILLGAVGAYDWNGAVLKETSAGKVIPHRESYLKEFPEELKNHAAYLGYTVTSVVSSRQGRVYVAGAPRFNHTGKVILFSMHNNRSLTIHQALRGEQIGSYFGSEITSVDVNDDRVTDVLLVGAPMYFSEGRERGKVYVYNLRQNRFVYNGTLKDSHSYQNARFGSCIASVQDLNQDSYNDVVVGAPLEDSHRGAIYIFHGFQTNILKKPMQRITASELAPGLQHFGCSIHGQLDLNEDGLVDLAVGALGNAVVLWARPVVQINASLHFEPSKINIFHKDCKRNGRDATCLAAFLCFIPIFLAPHFQTATVGIRYNATMDERRYMPRAHLDEGGDQFTNRAVLLSSGQEHCQRINFHVLDTADYVKPVAFSVEYSLEDPDNGPMLDNGWPTTLRVSVPFWNGCNEDEHCVPDLVLDARSDLPTAMEYCQRVLGRPAQDCSSYTLSFDTTVFIIESTRRRVAVEATLENRGENAYSAVLNISQSENLQFASLIQKDDSDNSIECVNEERRLHKKVCNVSYPFFRAKAKVAFRLDFEFSKSVFLHHLQIHLGAGSDSHEQDSTADDNTALLRFHLKYEADVLFTRSSSLSHFEVKANSSLESYDGIGPPFNCVFKVQNLGFFPIHGVMMKITVPIATRGGNRLLMLRDFFTDQGNTSCNIWGNSTEYRSTPTEEDLSHAPQRNHSNSDVVSIICNLRLAPSQETSFYLVGNLWLTSLKALKYRSLKITVNAALQRQFHSPFIFREEDPSRQVTFEISKQEDWQVPIWIIVGSTLGGLLLLALLVLALWKLGFFKSAKRKREPGLGPIPKELK

SEQ ID NO: 167 - protein, 22 aa, Mus Musculus
  SIGNAL (1)..(22)
MDFPRGLLVAWTLSLWPGFTDT

SEQ ID NO: 168 - protein, 1141 aa, Mus Musculus
MDFPRGLLVAWTLSLWPGFTDTFNMDTRNPRVIAGPSAAFFGYTVQQHDISGKKWLVVGAPMETNGHQKTGDVYKCPVTQGNCTKLNLGRVTLSNVSERKDNMRLGLSLATNPKDNSFLACSPLWSHECGSSYYTTGMCSRVNSNFRFSKTVAPALQRCQTYMDIVIVLDGSNSIYPWVEVQHFLINILKKFYIGPGQIQVGIVQYGEDAVHEFHLNDYRSVKDVVEAASHIEQRGGTETRTAFGIEFARSEAFQKGGRKGAKKVMIVITDGESHDSPDLEKVIRQSEKDNVTRYAVAVLGYYNRRGINPETFLNEIKYIASDPDDKHFFNVTDEAALKDIVDALGDRIFSLEGTNKNETSFGLEMSQTGFSSHVVEDGILLGAVGAYDWNGAVLKETSAGKVIPHRESYLKEFPEELKNHAAYLGYTVTSVVSSRQGRVYVAGAPRFNHTGKVILFSMHNNRSLTIHQALRGEQIGSYFGSEITSVDVNDDRVTDVLLVGAPMYFSEGRERGKVYVYNLRQNRFVYNGTLKDSHSYQNARFGSCIASVQDLNQDSYNDVVVGAPLEDSHRGAIYIFHGFQTNILKKPMQRITASELAPGLQHFGCSIHGQLDLNEDGLVDLAVGALGNAVVLWARPVVQINASLHFEPSKINIFHKDCKRNGRDATCLAAFLCFIPIFLAPHFQTATVGIRYNATMDERRYMPRAHLDEGGDQFTNRAVLLSSGQEHCQRINFHVLDTADYVKPVAFSVEYSLEDPDNGPMLDNGWPTTLRVSVPFWNGCNEDEHCVPDLVLDARSDLPTAMEYCQRVLGRPAQDCSSYTLSFDTTVFIIESTRRRVAVEATLENRGENAYSAVLNISQSENLQFASLIQKDDSDNSIECVNEERRLHKKVCNVSYPFFRAKAKVAFRLDFEFSKSVFLHHLQIHLGAGSDSHEQDSTADDNTALLRFHLKYEADVLFTRSSSLSHFEVKANSSLESYDGIGPPFNCVFKVQNLGFFPIHGVMMKITVPIATRGGNRLLMLRDFFTDQGNTSCNIWGNSTEYRSTPTEEDLSHAPQRNHSNSDVVSIICNLRLAPSQETSFYLVGNLWLTSLKALKYRSLKITVNAALQRQFHSPFIFREEDPSRQVTFEISKQEDWQVP

SEQ ID NO: 169 - protein, 182 aa, Mus Musculus
DIVIVLDGSNSIYPWVEVQHFLINILKKFYIGPGQIQVGIVQYGEDAVHEFHLNDYRSVKDVVEAASHIEQRGGTETRTAFGIEFARSEAFQKGGRKGAKKVMIVITDGESHDSPDLEKVIRQSEKDNVTRYAVAVLGYYNRRGINPETFLNEIKYIASDPDDKHFFNVTDEAALKDIVDAL

SEQ ID NO: 170 - protein, 36 aa, Mus Musculus
AFFGYTVQQHDISGKKWLVVGAPMETNGHQKTGDVY

SEQ ID NO: 171 - protein, 43 aa, Mus Musculus; identical to SEQ ID NO: 153

SEQ ID NO: 172 - protein, 26 aa, Mus Musculus
SQTGFSSHVVEDGILLGAVGAYDWNG

SEQ ID NO: 173 - protein, 35 aa, Mus Musculus
HAAYLGYTVTSVVSSRQGRVYVAGAPRFNHTGKVI

SEQ ID NO: 174 - protein, 39 aa, Mus Musculus
SYFGSEITSVDVNDDRVTDVLLVGAPMYFSEGRERGKVY

SEQ ID NO: 175 - protein, 36 aa, Mus Musculus
ARFGSCIASVQDLNQDSYNDVVVGAPLEDSHRGAIY

SEQ ID NO: 176 - protein, 39 aa, Mus Musculus
QHFGCSIHGQLDLNEDGLVDLAVGALGNAVVLWARPVVQ

SEQ ID NO: 177 - protein, 23 aa, Mus Musculus
IWIIVGSTLGGLLLLALLVLALW

SEQ ID NO: 178 - protein, 24 aa, Mus Musculus
KLGFFKSAKRKREPGLGPIPKELK

SEQ ID NO: 179 - protein, 56 aa, Homo Sapiens
PGSYFGYSVAGVGDLNGDKSGYPDLLLVGAPRGAVYVYFGSSNSGGGRCIPLQNLS

SEQ ID NO: 180 - protein, 54 aa, Homo Sapiens
RTAFFGYTVQQHDISGNKWLVVGAPLETNGYQKTGDVYKCPVIHGNCTKLNLGR

SEQ ID NO: 181 - protein, 51 aa, Homo Sapiens
HGAYLGYTVTSVSSRQGRVYVAGAPRFNHTGKVILFTMHNNRSLTIHQAMR

SEQ ID NO: 182 - protein, 57 aa, Homo Sapiens
IGSYFGSEITSVDIDGDGVTDVLLVGAPMYFNEGRERGKVYVYELRQNRFVYNGTLK

SEQ ID NO: 183 - protein, 56 aa, Homo Sapiens
QNARFGSSIASVRDLNQDSYNDVVVGAPLEDNHAGAIYIFHGFRGSILKTPKQRIT

SEQ ID NO: 184 - protein, 55 aa, Artificial Sequence
  Markov Model Sequence
GLQYFGCSIHGQLDLNEDGLIDLAVGALGNAVILWSRPVVQINASLHFEPSKINI

SEQ ID NO: 185 - protein, 57 aa, Artificial Sequence
  CXC Signature Motif
  VARIANT (1)..(2): Xaa is any amino acid or is absent
  misc_feature (4)..(4): Xaa can be any naturally occurring amino acid
  VARIANT (6)..(25): Xaa is any amino acid
  VARIANT (26)..(29): Xaa is any amino acid or is absent
  VARIANT (31)..(47): Xaa is any amino acid
  VARIANT (48)..(54): Xaa is any amino acid or is absent
  VARIANT (56)..(57): Xaa is any amino acid or is absent
XXCXCXXXXXXXXXXXXXXXXXXXXXXXXCXXXXXXXXXXXXXXXXXXXXXXXXCXX

SEQ ID NO: 186 - protein, 54 aa, Artificial Sequence
  CXC Signature Motif
  VARIANT (1)..(2): Xaa is any amino acid or is absent
  misc_feature (4)..(4): Xaa can be any naturally occurring amino acid
  VARIANT (6)..(28): Xaa is any amino acid
  VARIANT (29)..(29): Xaa is any amino acid or is absent
  VARIANT (31)..(50): Xaa is any amino acid
  VARIANT (51)..(51): Xaa is any amino acid or is absent
  VARIANT (53)..(54): Xaa is any amino acid
XXCXCXXXXXXXXXXXXXXXXXXXXXXXXCXXXXXXXXXXXXXXXXXXXXXCXX

SEQ ID NO: 187 - protein, 53 aa, Artificial Sequence
  CXC Signature Motif
  VARIANT (1)..(2): Xaa is any amino acid or is absent
  misc_feature (4)..(4): Xaa can be any naturally occurring amino acid
  VARIANT (6)..(11): Xaa is any amino acid
  VARIANT (12)..(12): Xaa is any amino acid or is absent
  VARIANT (13)..(13): Xaa is Leu, Ile, Val, Met, Phe, or Tyr
  VARIANT (14)..(15): Xaa is any amino acid
  VARIANT (16)..(16): Xaa is Arg, Lys, Ser, Glu, or Gln
  misc_feature (17)..(17): Xaa can be any naturally occurring amino acid
  VARIANT (18)..(18): Xaa is Lue, Ile, Val, or Met
  VARIANT (19)..(20): Xaa is any amino acid
  VARIANT (21)..(21): Xaa is Leu, Ile, Val, or Met
  VARIANT (22)..(29): Xaa is any amino acid
  VARIANT (31)..(34): Xaa is any amino acid
  VARIANT (35)..(36): Xaa is Leu, Ile, Val, or Met
  VARIANT (37)..(49): Xaa is any amino acid
  VARIANT (50)..(50): Xaa is any amino acid or is absent
  VARIANT (52)..(52): Xaa is Leu, Trp, or Met
  misc_feature (53)..(53): Xaa can be any naturally occurring amino acid
XXCXCXXXXXXXXXXXXXXXXXXXXXXXXCXXXXXXXXXXXXXXXXXXXXCXX

SEQ ID NO: 188 - protein, 53 aa, Artificial Sequence
  CXC Signature Motif
  VARIANT (1)..(1): Xaa is any amino acid or is absent
  VARIANT (2)..(2): Xaa is Arg or Lys
  VARIANT (4)..(4): Xaa is Arg or Lys
  VARIANT (6)..(9): Xaa is any amino acid
  VARIANT (11)..(14): Xaa is any amino acid
  VARIANT (15)..(15): Xaa is any amino acid or is absent
  VARIANT (16)..(16): Xaa is Glu or Asp
  VARIANT (17)..(22): Xaa is any amino acid
  VARIANT (23)..(23): Xaa is Lys or Arg
  VARIANT (24)..(29): Xaa is any amino acid
  VARIANT (30)..(30): Xaa is Asp or Glu
  VARIANT (31)..(31): Xaa is Asp or Glu
  misc_feature (32)..(32): Xaa can be any naturally occurring amino acid
  VARIANT (33)..(36): Xaa is Leu, Ile, Val, Met, Phe, or Tyr
  VARIANT (37)..(48): Xaa is any amino acid
  VARIANT (49)..(49): Xaa is any amino acid or is absent
  VARIANT (52)..(52): Xaa is Leu, Ile, Val, or Met
XXCXCXXXXPXXXXXXXXXXXXXXXXXXCXXXXXXXXXXXXXXXXXXXXHCXH

SEQ ID NO: 189 - protein, 35 aa, Artificial Sequence
  Repeat Consensus Sequence
  VARIANT (3)..(12): Xaa is any amino acid
  VARIANT (13)..(32): Xaa is any amino acid or is absent
  VARIANT (33)..(33): Xaa is Gly or Ala
  VARIANT (35)..(35): Xaa is Pro, Leu, or Gln
FGXXXXXXXXXXXXXXXXXXXXXXXXXXXXXXXAX

SEQ ID NO: 190 - protein, 45 aa, Artificial Sequence
  Repeat Consensus Sequence
  VARIANT (1)..(1): Xaa is Gly or Ser
  VARIANT (2)..(2): Xaa is Phe or Tyr
  VARIANT (3)..(7): Xaa is any amino acid
  VARIANT (8)..(42): Xaa is any amino acid or is absent
  VARIANT (43)..(43): Xaa is Glu, Val, or Leu
  VARIANT (44)..(44): Xaa is Ala or Met
  VARIANT (45)..(45): Xaa is Pro or Tyr
XXXXXXXXXXXXXXXXXXXXXXXXXXXXXXXXXXXXXXXXXXXXX

SEQ ID NO: 191 - protein, 53 aa, Artificial Sequence
  I Domain Consensus Sequence
  misc_feature (4)..(4): Xaa can be any naturally occurring amino acid
  VARIANT (6)..(10): Xaa is any amino acid
  VARIANT (11)..(20): Xaa is any amino acid or is absent
  VARIANT (22)..(35): Xaa is any amino acid
  VARIANT (36)..(51): Xaa is any amino acid or is absent
DGSXSXXXXXXXXXXXXXXXFXXXXXXXXXXXXXXXXXXXXXXXXXXXXXXQY

SEQ ID NO: 192 - protein, 8 aa, Artificial Sequence
  A259 Cytoplasmic Domain Consensus Sequence
  VARIANT (1)..(1): Xaa = F, Y, W or S
  VARIANT (2)..(2): Xaa = R or K
  VARIANT (3)..(3): Xaa = 0-1 amino acids where each amino acid can be any amino acid
  VARIANT (7)..(7): Xaa = 0-1 amino acids where each amino acid can be any amino acid
XXXGFFXR

SEQ ID NO: 193 - DNA, 21 bp, Artificial Sequence
  Oligonucleotide
tgcaacttttacaggaaacac

SEQ ID NO: 194 - DNA, 21 bp, Artificial Sequence
  Oligonucleotide
cctcacttttacccgagactc

SEQ ID NO: 195 - DNA, 21 bp, Artificial Sequence
  Oligonucleotide
gacgggtggtacttaaaacaa
